(19) United States
(12) Patent Application Publication
(10) Pub. No.: US 2010/0267012 A1
(43) Pub. Date: Oct. 21, 2010

(54) Highly conserved genes and their use to generate probes and primers for detection of microorganisms

(76) Inventors: Michel G. Bergeron, Quebec (CA); Maurice Boissinot, Saint-Augustin-de-Desmaures (CA); Ann Huletsky, Sillery (CA); Christian Menard, St-Lambert-de-Levis (CA); Marc Ouellette, Sillery (CA); Francois Picard, Cap-Rouge (CA); Paul H. Roy, Loretteville (CA)

Correspondence Address: KNOBBE MARTENS OLSON & BEAR LLP, 2040 MAIN STREET, FOURTEENTH FLOOR, IRVINE, CA, 92614, US

(21) Appl. No.: 11/522,253

(22) Filed: Sep. 14, 2006

Related U.S. Application Data
(63) Continuation-in-part of application No. 11/236,785, filed on Sep. 27, 2005.
Application No. 11/236,785 is a continuation of application No. 10/089,177, filed on Mar. 27, 2002, now abandoned.
Application No. 10/089,177 is a continuation-in-part of application No. 10/753,169, filed on Jan. 7, 2004.
Application No. 10/753,169 is a continuation of application No. 09/989,643, filed on Nov. 20, 2001, now abandoned.
Application No. 09/989,643 is a continuation of application No. 09/297,539, filed on May 3, 1999, now abandoned.

(30) Foreign Application Priority Data
Sep. 28, 1999 (CA) 2283458
May 19, 2000 (CA) 2037010

(51) Int. Cl. C12Q 1/68; C07H 21/00

(52) U.S. Cl. 435/6; 536/24.33

(57) ABSTRACT

Compositions and methods for the detection of vancomycin-resistant pathogens using primers and/or probes to the vanA and vanB genes.

### CROSS-REFERENCE TO RELATED APPLICATIONS

[0001] This application is a continuation-in-part of application Ser. No. 11/236,785, filed Sep. 27, 2005, which is a continuation of Ser. No. 10/089,177, filed Mar. 27, 2002, which is the U.S. national phase under 35 U.S.C. §371 of prior PCT International Application No. PCT/CA00/01150, filed Sep. 28, 2000, which claims the benefit of Canada Application No. 2037010 filed May 19, 2000, and Canada Application No. 2283458, filed Sep. 28, 1999, the disclosures of which are hereby expressly incorporated by reference in their entireties. This application is also a continuation-in-part of application Ser. No. 10/753,169, filed Jan. 7, 2004, which is a continuation of application Ser. No. 09/989,643, filed Nov. 20, 2001 which is a continuation of application Ser. No. 09/297,539 filed May 3, 1999 which is a national phase of PCT/CA97/00829 filed Nov. 4, 1997, which claims priority to application Ser. No. 08/743,637, filed Nov. 4, 1996, the disclosures of which are hereby expressly incorporated by reference in their entireties.

### SEQUENCE LISTING

[0002] The present application is being filed along with duplicate copies of a CD-ROM marked “Copy 1” and “Copy 2” containing a Sequence Listing in electronic format. The duplicate copies of the CD-ROM each contain a file entitled GENOM.048NPCCP1.TXT created on Sep. 14, 2006 and is 1,929,380 bytes in size. The information on these duplicate CD-ROMs is incorporated herein by reference in its entirety.

### BACKGROUND OF THE INVENTION

### Classical Methods for the Identification of Microorganisms

[0003] Microorganisms are classically identified by their ability to utilize different substrates as a source of carbon and nitrogen through the use of biochemical tests such as the API20E™ system (bioMérieux). For susceptibility testing, clinical microbiology laboratories use methods including disk diffusion, agar dilution and broth microdilution. Although identifications based on biochemical tests and antibacterial susceptibility tests are cost-effective, generally two days are required to obtain preliminary results due to the necessity of two successive overnight incubations to identify the bacteria from clinical specimens as well as to determine their susceptibility to antimicrobial agents. There are some commercially available automated systems (i.e. the MicroScan™ system from Dade Behring and the Vitek™ system from bioMérieux) which use sophisticated and expensive apparatus for faster microbial identification and susceptibility testing (Stager and Davis, 1992, Clin. Microbiol. Rev. 5:302-327). These systems require shorter incubation periods, thereby allowing most bacterial identifications and susceptibility testing to be performed in less than 6 hours. Nevertheless, these faster systems always require the primary isolation of the bacteria or fungi as a pure culture, a process which takes at least 18 hours for a pure culture or 2 days for a mixed culture. So, the shortest time from sample reception to identification of the pathogen is around 24 hours. Moreover, fungi other than yeasts are often difficult or very slow to grow from clinical specimens. Identification must rely on labor-intensive techniques such as direct microscopic examination of the specimens and by direct and/or indirect immunological assays. Cultivation of most parasites is impractical in the clinical laboratory. Hence, microscopic examination of the specimen, a few immunological tests and clinical symptoms are often the only methods used for an identification that frequently remains presumptive.

[0004] The fastest bacterial identification system, the autoSCAN-Walk-Away™ system (Dade Behring) identifies both gram-negative and gram-positive bacterial species from standardized inoculum in as little as 2 hours and gives susceptibility patterns to most antibiotics in 5 to 6 hours. However, this system has a particularly high percentage (i.e. 3.3 to 40.5%) of non-conclusive identifications with bacterial species other than Enterobacteriaceae (Croizé J., 1995, Lett. Infectiol. 10:109-113; York et al., 1992, J. Clin. Microbiol. 30:2903-2910). For Enterobacteriaceae, the percentage of non-conclusive identifications was 2.7 to 11.4%. The list of microorganisms identified by commercial systems based on classical identification methods is given in Table 15.

[0005] A wide variety of bacteria and fungi are routinely isolated and identified from clinical specimens in microbiology laboratories. Tables 1 and 2 give the incidence for the most commonly isolated bacterial and fungal pathogens from various types of clinical specimens. These pathogens are the main organisms associated with nosocomial and community-acquired human infections and are therefore considered the most clinically important.

### Clinical Specimens Tested in Clinical Microbiology Laboratories

[0006] Most clinical specimens received in clinical microbiology laboratories are urine and blood samples. At the microbiology laboratory of the Centre Hospitalier de l'Université Laval (CHUL), urine and blood account for approximately 55% and 30% of the specimens received, respectively (Table 3). The remaining 15% of clinical specimens comprise various biological fluids including sputum, pus, cerebrospinal fluid, synovial fluid, and others (Table 3). Infections of the urinary tract, the respiratory tract and the bloodstream are usually of bacterial etiology and require antimicrobial therapy. In fact, all clinical samples received in the clinical microbiology laboratory are tested routinely for the identification of bacteria and antibiotic susceptibility.

Conventional Pathogen Identification from Clinical Specimens

### Urine Specimens

[0007] The search for pathogens in urine specimens is so preponderant in the routine microbiology laboratory that a myriad of tests have been developed. However, the gold standard remains the classical semi-quantitative plate culture method in which 1 μL of urine is streaked on agar plates and incubated for 18-24 hours. Colonies are then counted to determine the total number of colony forming units (CFU) per liter of urine. A bacterial urinary tract infection (UTI) is normally associated with a bacterial count of 10⁷ CFU/L or more in urine. However, infections with less than 10⁷ CFU/L in urine are possible, particularly in patients with a high incidence of diseases or those catheterized (Stark and Maki, 1984, N. Engl. J. Med. 311:560-564). Importantly, approximately 80% of urine specimens tested in clinical microbiology laboratories are considered negative (i.e. bacterial count of less than 10⁷ CFU/L; Table 3). Urine specimens found positive by culture are further characterized using standard biochemical tests to identify the bacterial pathogen and are also tested for susceptibility to antibiotics. The biochemical and susceptibility testing normally require 18-24 hours of incubation.

[0008] Accurate and rapid urine screening methods for bacterial pathogens would allow a faster identification of negative specimens and a more efficient treatment and care management of patients. Several rapid identification methods (Uriscreen™, UTIscreen™, Flash Track™ DNA probes and others) have been compared to slower standard biochemical methods, which are based on culture of the bacterial pathogens. Although much faster, these rapid tests showed low sensitivities and poor specificities as well as a high number of false negative and false positive results (Koening et al., 1992, J. Clin. Microbiol. 30:342-345; Pezzlo et al., 1992, J. Clin. Microbiol. 30:640-684).

### Blood Specimens

[0009] The Blood Specimens Received In The Microbiology Laboratory Are Always Submitted For Culture. Blood Culture Systems May Be Manual, Semi-Automated Or Completely Automated. The BACTEC™ System (From Becton Dickinson) And The Bactalert™ System (From Organon Teknika Corporation) Are The Two Most Widely Used Automated Blood Culture Systems. These Systems Incubate Blood Culture Bottles Under Optimal Conditions For Growth Of Most Bacteria. Bacterial Growth Is Monitored Continuously To Detect Early Positives By Using Highly Sensitive Bacterial Growth Detectors. Once Growth Is Detected, A Gram Stain Is Performed Directly From The Blood Culture And Then Used To Inoculate Nutrient Agar Plates. Subsequently, Bacterial Identification And Susceptibility Testing Are Carried Out From Isolated Bacterial Colonies With Automated Systems As Described Previously. Blood Culture Bottles Are Normally Reported As Negative If No Growth Is Detected After An Incubation Of 6 To 7 Days. Normally, The Vast Majority Of Blood Cultures Are Reported Negative. For Example, The Percentage Of Negative Blood Cultures At The Microbiology Laboratory Of The CHUL For The Period February 1994-January 1995 Was 93.1% (Table 3).

### Other Clinical Samples

[0010] Upon receipt by the clinical microbiology laboratory, all body fluids other than blood and urine that are from normally sterile sites (i.e. cerebrospinal, synovial, pleural, pericardial and others) are processed for direct microscopic examination and subsequent culture. Again, most clinical samples are negative for culture (Table 3). In all these normally sterile sites, tests for the universal detection of algae, archaea, bacteria, fungi and parasites would be very useful.

[0011] Regarding clinical specimens which are not from sterile sites such as sputum or stool specimens, the laboratory diagnosis by culture is more problematic because of the contamination by the normal flora. The bacterial or fungal pathogens potentially associated with the infection are grown and separated from the colonizing microbes using selective methods and then identified as described previously. Of course, the DNA-based universal detection of bacteria would not be useful for the diagnosis of bacterial infections at these non-sterile sites. On the other hand, DNA-based assays for species or genus or family or group detection and identification as well as for the detection of antimicrobial agents resistance genes from these specimens would be very useful and would offer several advantages over classical identification and susceptibility testing methods.

DNA-Based Assays with any Specimen

[0012] There is an obvious need for rapid and accurate diagnostic tests for the detection and identification of algae, archaea, bacteria, fungi and parasites directly from clinical specimens. DNA-based technologies are rapid and accurate and offer a great potential to improve the diagnosis of infectious diseases (Persing et al., 1993, Diagnostic Molecular Microbiology: Principles and Applications, American Society for Microbiology, Washington, D.C.; Bergeron and Ouellette, 1995, Infection 23:69-72; Bergeron and Ouellette, 1998, J Clin Microbiol. 36:2169-72). The DNA probes and amplification primers which are objects of the present invention are applicable for the detection and identification of algae, archaea, bacteria, fungi, and parasites directly from any clinical specimen such as blood, urine, sputum, cerebrospinal fluid, pus, genital and gastro-intestinal tracts, skin or any other type of specimens (Table 3). These assays are also applicable to detection from microbial cultures (e.g. blood cultures, bacterial or fungal colonies on nutrient agar, or liquid cell cultures in nutrient broth). The DNA-based tests proposed in this invention are superior in terms of both rapidity and accuracy to standard biochemical methods currently used for routine diagnosis from any clinical specimens in microbiology laboratories. Since these tests can be performed in one hour or less, they provide the clinician with new diagnostic tools which should contribute to a better management of patients with infectious diseases. Specimens from sources other than humans (e.g. other primates, birds, plants, mammals, farm animals, livestock, food products, environment such as water or soil, and others) may also be tested with these assays.

### A High Percentage of Culture-Negative Specimens

[0013] Among all the clinical specimens received for routine diagnosis, approximately 80% of urine specimens and even more (around 95%) for other types of normally sterile clinical specimens are negative for the presence of bacterial pathogens (Table 3). It would also be desirable, in addition to identify bacteria at the species or genus or family or group level in a given specimen, to screen out the high proportion of negative clinical specimens with a DNA-based test detecting the presence of any bacterium (i.e. universal bacterial detection). As disclosed in the present invention, such a screening test may be based on DNA amplification by PCR of a highly conserved genetic target found in all bacteria. Specimens negative for bacteria would not be amplified by this assay. On the other hand, those that are positive for any bacterium would give a positive amplification signal. Similarly, highly conserved genes of fungi and parasites could serve not only to identify particular species or genus or family or group but also to detect the presence of any fungi or parasite in the specimen.

### Towards the Development of Rapid DNA-Based Diagnostic Tests

[0014] A rapid diagnostic test should have a significant impact on the management of infections. DNA probe and DNA amplification technologies offer several advantages over conventional methods for the identification of pathogens and antimicrobial agents resistance genes from clinical samples (Persing et al., 1993, Diagnostic Molecular Microbiology: Principles and Applications, American Society for Microbiology, Washington, D.C.; Ehrlich and Greenberg, 1994, PCR-based Diagnostics in Infectious Disease, Blackwell Scientific Publications, Boston, Mass.). There is no need for culture of the pathogens, hence the organisms can be detected directly from clinical samples, thereby reducing the time associated with the isolation and identification of pathogens. Furthermore, DNA-based assays are more accurate for microbial identification than currently used phenotypic identification systems which are based on biochemical tests and/or microscopic examination. Commercially available DNA-based technologies are currently used in clinical microbiology laboratories, mainly for the detection and identification of fastidious bacterial pathogens such as Mycobacterium tuberculosis, Chlamydia trachomatis, Neisseria gonorrhoeae as well as for the detection of a variety of viruses (Tang Y. and Persing D. H., Molecular detection and identification of microorganisms, In: P. Murray et al., 1999, Manual of Clinical Microbiology, ASM press, 7^{th} edition, Washington D.C.). There are also other commercially available DNA-based assays which are used for culture confirmation assays.

[0015] Others have developed DNA-based tests for the detection and identification of bacterial pathogens which are objects of the present invention, for example: Staphylococcus sp. (U.S. Pat. No. 5,437,978), Neisseria sp. (U.S. Pat. No. 5,162,199 and European patent serial no. 0,337,896,131) and Listeria monocytogenes (U.S. Pat. Nos. 5,389,513 and 5,089,386). However, the diagnostic tests described in these patents are based either on rRNA genes or on genetic targets different from those described in the present invention. To our knowledge there are only four patents published by others mentioning the use of any of the four highly conserved gene targets described in the present invention for diagnostic purposes (PCT international publication number WO92/03455 and WO00/14274, European patent publication number 0 133 671 B1, and European patent publication number 0 133 288 A2). WO92/03455 is focused on the inhibition of Candida species for therapeutic purposes. It describes antisense oligonucleotide probes hybridizing to Candida messenger RNA. Two of the numerous mRNA proposed as targets are coding for translation elongation factor 1 (tef1) and the beta subunit of ATPase. DNA amplification or hybridization are not under the scope of their invention and although diagnostic use is briefly mentioned in the body of the application, no specific claim is made regarding diagnostics. WO00/14274 describes the use of bacterial recA gene for identification and speciation of bacteria of the Burkholderia cepacia complex. Specific claims are made on a method for obtaining nucleotide sequence information for the recA gene from the target bacteria and a following comparison with a standard library of nucleotide sequence information (claim 1), and on the use of PCR for amplification of the recA gene in a sample of interest (claims 4 to 7, and 13). However, the use of a discriminatory restriction enzyme in a RFLP procedure is essential to fulfill the speciation and WO00/14274 did not mention that multiple recA probes could be used simultaneously. Patent EP 0 133 288 A2 describes and claims the use of bacterial tuf (and fus) sequence for diagnostics based on hybridization of a tuf (or fus) probe with bacterial DNA. DNA amplification is not under the scope of EP 0 133 288 A2. Nowhere it is mentioned that multiple tuf (or fus) probes could be used simultaneously. No mention is made regarding speciation using tuf (or fus) DNA nucleic acids and/or sequences. The sensitivities of the tuf hybridizations reported are 1×10⁶ bacteria or 1-100 ng of DNA. This is much less sensitive than what is achieved by our assays using nucleic acid amplification technologies.

[0016] Although there are phenotypic identification methods which have been used for more than 125 years in clinical microbiology laboratories, these methods do not provide information fast enough to be useful in the initial management of patients. There is a need to increase the speed of the diagnosis of commonly encountered bacterial, fungal and parasitical infections. Besides being much faster, DNA-based diagnostic tests are more accurate than standard biochemical tests presently used for diagnosis because the microbial genotype (e.g. DNA level) is more stable than the phenotype (e.g. physiologic level).

[0017] Bacteria, fungi and parasites encompass numerous well-known microbial pathogens. Other microorganisms could also be pathogens or associated with human diseases. For example, achlorophylious algae of the Prototheca genus can infect humans. Archae, especially methanogens, are present in the gut flora of humans (Reeve, J. H., 1999, J. Bacteriol. 181:3613-3617). However, methanogens have been associated to pathologic manifestations in the colon, vagina, and mouth (Belay et al., 1988, Appl. Enviro. Microbiol. 54:600-603; Belay et al., 1990, J. Clin. Microbiol. 28:1666-1668; Weaver et al., 1986, Gut 27:698-704).

[0018] In addition to the identification of the infectious agent, it is often desirable to identify harmful toxins and/or to monitor the sensitivity of the microorganism to antimicrobial agents. As revealed in this invention, genetic identification of the microorganism could be performed simultaneously with toxin and antimicrobial agents resistance genes. Alternatively, assays to identify toxin and/or antimicrobial resistance genes can be performed separately and independently from assays for identification of infectious agents.

[0019] Knowledge of the genomic sequences of algal, archaeal, bacterial, fungal and parasitical species continuously increases as testified by the number of sequences available from public databases such as GenBank. From the sequences readily available from those public databases, there is no indication therefrom as to their potential for diagnostic purposes. For determining good candidates for diagnostic purposes, one could select sequences for DNA-based assays for (i) the species-specific detection and identification of commonly encountered bacterial, fungal and parasitical pathogens, (ii) the genus-specific detection and identification of commonly encountered bacterial, fungal or parasitical pathogens, (iii) the family-specific detection and identification of commonly encountered bacterial, fungal or parasitical pathogens; (iv) the group-specific detection and identification of commonly encountered bacterial, fungal or parasitical pathogens, (v) the universal detection of algal, archaeal, bacterial, fungal or parasitical pathogens, and/or (vi) the specific detection and identification of antimicrobial agents resistance genes, and/or (vii) the specific detection and identification of bacterial toxin genes. All of the above types of DNA-based assays may be performed directly from any type of clinical specimens or from a microbial culture.

[0020] In our assigned U.S. Pat. No. 6,001,564 and our WO98/20157 patent publication, we described DNA sequences suitable for (i) the species-specific detection and identification of clinically important bacterial pathogens, (ii) the universal detection of bacteria, and (iii) the detection of antimicrobial agents resistance genes.

[0021] The WO98/20157 patent publication describes proprietary tuf DNA sequences as well as tuf sequences selected from public databases (in both cases, fragments of at least 100 base pairs), as well as oligonucleotide probes and amplification primers derived from these sequences. All the nucleic acid sequences described in that patent publication can enter in the composition of diagnostic kits or products and methods capable of a) detecting the presence of bacteria and fungi b) detecting specifically at the species, genus, family or group levels, the presence of bacteria and fungi and antimicrobial agents resistance genes associated with these pathogens. However, these methods and kits need to be improved, since the ideal kit and method should be capable of diagnosing close to 100% of microbial pathogens and associated antimicrobial agents resistance genes and toxins genes. For example, infections caused by Enterococcus faecium have become a clinical problem because of its resistance to many antibiotics. Both the detection of these bacteria and the evaluation of their resistance profiles are desirable. Besides that, novel DNA sequences (probes and primers) capable of recognizing the same and other microbial pathogens or the same and additional antimicrobial agents resistance genes are also desirable to aim at detecting more target genes and complement our earlier patent applications.

[0022] The present invention improves the assigned application by disclosing new proprietary tuf nucleic acids and/or sequences as well as describing new ways to obtain tuf nucleic acids and/or sequences. In addition we disclose new proprietary atpD and recA nucleic acids and/or sequences. In addition, new uses of tuf, atpD and recA DNA nucleic acids and/or sequences selected from public databases (Table 11) are disclosed.

### Highly Conserved Genes for Identification and Diagnostics

[0023] Highly conserved genes are useful for identification of microorganisms. For bacteria, the most studied genes for identification of microorganisms are the universally conserved ribosomal RNA genes (rRNA). Among those, the principal targets used for identification purposes are the small subunit (SSU) ribosomal 16S rRNA genes (in prokaryotes) and 18S rRNA genes (in eukaryotes) (Relman and Persing, Genotyping Methods for Microbial Identification, In: D. H. Persing, 1996, PCR Protocols for Emerging Infectious Diseases, ASM Press, Washington D.C.). The rRNA genes are also the most commonly used targets for universal detection of bacteria (Chen et al., 1988, FEMS Microbiol. Lett. 57:19-24; McCabe et al., 1999, Mol. Genet. Metabol. 66:205-211) and fungi (Van Burik et al., 1998, J. Clin. Microbiol. 36:1169-1175).

[0024] However, it may be difficult to discriminate between closely related species when using primers derived from the 16S rRNA. In some instances, 16S rRNA sequence identity may not be sufficient to guarantee species identity (Fox et al., 1992, Int. J. Syst. Bacteriol. 42:166-170) and it has been shown that inter-operon sequence variation as well as strain to strain variation could undermine the application of 16S rRNA for identification purposes (Clayton et al., 1995, Int. J. Syst. Bacteriol. 45:595-599). The heat shock proteins (HSP) are another family of very conserved proteins. These ubiquitous proteins in bacteria and eukaryotes are expressed in answer to external stress agents. One of the most described of these HSP is HSP 60. This protein is very conserved at the amino acid level, hence it has been useful for phylogenetic studies. Similar to 16S rRNA, it would be difficult to discriminate between species using the HSP 60 nucleotide sequences as a diagnostic tool. However, Goh et al. identified a highly conserved region flanking a variable region in HSP 60, which led to the design of universal primers amplifying this variable region (Goh et al., U.S. Pat. No. 5,708,160). The sequence variations in the resulting amplicons were found useful for the design of species-specific assays.

### SUMMARY OF THE INVENTION

[0025] Disclosed herein are compositions and methods for the detection and quantitation of antibiotic resistant organisms from a sample.

[0026] Some embodiments relate to compositions for the detection of a vancomycin resistant pathogen in a sample using a nucleic acid amplification assay. The composition can include at least one primer pair, comprising a forward and a reverse oligonucleotide, wherein the forward and reverse oligonucleotides each includes a binding region that is complementary to primer binding sites present on opposite strands of the pathogen's DNA, wherein the primer pair is adapted to amplify a vanA or vanB gene of the pathogen's DNA between and including said primer binding sites to produce a detectable amplification product. The binding regions of the oligonucleotides can correspond to, or be fully complementary to, at least 10, 11, 12, 13, 14, 15, 16, 17, 18, 19, or 20 consecutive nucleotides of at least two of the following sequences: SEQ ID NO: 1090, SEQ ID NO: 1091, SEQ ID NO: 1095, SEQ ID NO: 2298 and SEQ ID NO: 1096.

[0027] In some embodiments, the composition includes a primer pair wherein the primers comprise, consist essentially of, or consist of at least 10 consecutive nucleotides of SEQ ID NO: 1095 and SEQ ID NO: 1096. Preferred compositions include a primer pair wherein the primers comprises, consists essentially of, or consist of the sequences of SEQ ID NO: 1095 and SEQ ID NO: 1096.

[0028] Preferably, the composition comprises at least four primers, wherein the each of the four primers comprises, consists essentially of, or consists of at least 10 consecutive nucleotides of SEQ ID NOs: 1090, 1091, 1096 and 2298, or the complements thereof. In other preferred embodiments, the four primers comprise, consist essentially of, or consist of the SEQ ID NO: 1090, 1091, 1096, and 2298.

[0029] In some embodiments, the composition can also include at least one internal hybridization probe, wherein the internal hybridization probe can hybridize under stringent condition to the vanA or vanB amplification products produced by the compositions described above. Preferably, the internal hybridization probe is a molecular beacon. In more preferred embodiments, the molecular beacon can include the sequence of SEQ ID NO: 2299 or SEQ ID NO: 2300.

[0030] In further embodiments, the compositions can also include at least one internal control DNA, which can be amplified to produce an internal control amplicon under the same conditions and using the same oligonucleotides of the compositions described above. In further embodiments, the compositions can include an internal control probe that can hybridize under stringent conditions to the internal control amplicon. In some embodiments, the internal control DNA comprises the sequence of SEQ ID NO: 2302. Preferably, the internal control probe is a molecular beacon. In some embodiments, the internal control probe includes at least 10 consecutive nucleotides of the sequence of SEQ ID NO: 2301.

[0031] Also provided herein are kits that include the compositions described herein.

[0032] Methods to detect the presence of vancomycin-resistant organisms in a sample are also provided. In some embodiments, the method can include the step of annealing the nucleic acids of the sample with at least one probe and/or primer, wherein each of the primers and/or probes include nucleic acid sequences that correspond to, or are fully complementary to, at least 10 consecutive nucleotides of at least two of the following sequences: SEQ ID NO: 1090, SEQ ID NO: 1091, SEQ ID NO: 1095 and SEQ ID NO: 1096. The presence and/or amount of primer or probe that is annealed to said sample nucleic acid can be detected. In some embodiments, the primers and/or probes can include the nucleic acid sequences of SEQ ID NO's 1090, 1091, 1096 and 2297, or the complements thereof.

[0033] Preferably, the primers and/or probes are placed in the same physical enclosure.

[0034] In some embodiments, wherein at least one pair of primers is annealed to the sample DNA, and wherein said primer pair include nucleic acid sequences that correspond to, or are fully complementary to, at least 10 consecutive nucleotides of SEQ ID NO: 1090 and 1091 or SEQ ID NO: 1095 and 1096, the methods also include a step of amplifying the sample DNA with the annealed primer pair(s). For example, in some embodiments, the amplification step can include a method selected from the group consisting of:

[0035] (a) polymerase chain reaction (PCR),

[0036] (b) ligase chain reaction,

[0037] (c) nucleic acid sequence-based amplification,

[0038] (d) self-sustained sequence replication,

[0039] (e) strand displacement amplification,

[0040] (f) branched DNA signal amplification,

[0041] (g) nested PCR, and

[0042] (h) multiplex PCR.

[0043] Preferably, the amplification step includes a PCR amplification step.

[0044] In some embodiments that include an amplification step, the sample can also be contacted with at least one probe that hybridizes to an amplification product produced from at least one of the primer pairs. In preferred embodiments, the probe includes at least 10 consecutive nucleotides of the sequence of SEQ ID NO: 2299 or 2300. For example, in some embodiments, the at least one probe includes the sequence of SEQ ID NO: 2299 or 2300.

[0045] It is an object of the present invention to provide a specific, ubiquitous and sensitive method using probes and/or amplification primers for determining the presence and/or amount of nucleic acids:
[0046] from any algal, archaeal, bacterial, fungal or parasitical species in any sample suspected of containing said nucleic acids, and optionally,
[0047] from specific microbial species or genera selected from the group consisting of the species or genera listed in Table 4, and optionally,
[0048] from an antimicrobial agents resistance gene selected from the group consisting of the genes listed in Table 5, and optionally,
[0049] from a toxin gene selected from the group consisting of the genes listed in Table 6,
   [0050] wherein each of said nucleic acids or a variant or part thereof comprises a selected target region hybridizable with said probes or primers;
   [0051] said method comprising the steps of contacting said sample with said probes or primers and detecting the presence and/or amount of hybridized probes or amplified products as an indication of the presence and/or amount of said any microbial species, specific microbial species or genus or family or group and antimicrobial agents resistance gene and/or toxin gene.

[0052] In a specific embodiment, a similar method directed to each specific microbial species or genus or family or group detection and identification, antimicrobial agents resistance genes detection, toxin genes detection, and universal bacterial detection, separately, is provided.

[0053] In a more specific embodiment, the method makes use of DNA fragments from conserved genes (proprietary sequences and sequences obtained from public databases), selected for their capacity to sensitively, specifically and ubiquitously detect the targeted algal, archaeal, bacterial, fungal or parasitical nucleic acids.

[0054] In a particularly preferred embodiment, oligonucleotides of at least 12 nucleotides in length have been derived from the longer DNA fragments, and are used in the present method as probes or amplification primers. To be a good diagnostic candidate, an oligonucleotide of at least 12 nucleotides should be capable of hybridizing with nucleic acids from given microorganism(s), and with substantially all strains and representatives of said microorganism(s); said oligonucleotide being species-, or genus-, or family-, or group-specific or universal.

[0055] In another particularly preferred embodiment, oligonucleotides primers and probes of at least 12 nucleotides in length are designed for their specificity and ubiquity based upon analysis of our databases of tuf, atpD and recA sequences. These databases are generated using both proprietary and public sequence information. Altogether, these databases form a sequence repertory useful for the design of primers and probes for the detection and identification of algal, archaeal, bacterial, fungal and parasitical microorganisms. The repertory can also be subdivided into subrepertories for sequence analysis leading to the design of various primers and probes.

[0056] The tuf, atpD and recA sequences databases as a product to assist the design of oligonucleotides primers and probes for the detection and identification of algal, archaeal, bacterial, fungal and parasitical microorganisms are also covered.

[0057] The proprietary oligonucleotides (probes and primers) are also another object of this invention.

[0058] Diagnostic kits comprising probes or amplification primers such as those for the detection of a microbial species or genus or family or phylum or group selected from the following list consisting of Abiotrophia adiacens, Acinetobacter baumanii, Actinomycetae, Bacteroides, Cytophaga and Flexibacter phylum, Bacteroides fragilis, Bordetella pertussis, Bordetella sp., Campylobacter jejuni and C. coli, Candida albicans, Candida dubliniensis, Candida glabrata, Candida guilliermondii, Candida krusei, Candida lusitaniae, Candida parapsilosis, Candida tropicalis, Candida zeylanoides, Candida sp., Chlamydia pneumoniae, Chlamydia trachomatis, Clostridium sp., Corynebacterium sp., Crypococcus neoformans, Cryptococcus sp., Cryptosporidium parvum, Entamoeba sp., Enterobacteriaceae group, Enterococcus casseliflavus-flavescens-gallinarum group, Enterococcus faecalis, Enterococcus faecium, Enterococcus gallinarum, Enterococcus sp., Escherichia coli and Shigella sp. group, Gemella sp., Giardia sp., Haemophilus influenzae, Klebsiella pneumoniae, Legionella pneumophila, Legionella sp., Leishmania sp., Mycobacteriaceae family, Mycoplasma pneumoniae, Neisseria gonorrhoeae, platelets contaminants group (see Table 14), Pseudomonas aeruginosa, Pseudomonads group, Staphylococcus aureus, Staphylococcus epidermidis, Staphylococcus haemolyticus, Staphylococcus hominis, Staphylococcus saprophyticus, Staphylococcus sp., Streptococcus agalactiae, Streptococcus pneumoniae, Streptococcus pyogenes, Streptococcus sp., Trypanosoma brucei, Trypanosoma cruzi, Trypanosoma sp., Trypanosomatidae family, are also objects of the present invention.

[0059] Diagnostic kits further comprising probes or amplification primers for the detection of an antimicrobial agents resistance gene selected from the group listed in Table 5 are also objects of this invention.

[0060] Diagnostic kits further comprising probes or amplification primers for the detection of a toxin gene selected from the group listed in Table 6 are also objects of this invention.

[0061] Diagnostic kits further comprising probes or amplification primers for the detection of any other algal, archaeal, bacterial, fungal or parasitical species than those specifically listed herein, comprising or not comprising those for the detection of the specific microbial species or genus or family or group listed above, and further comprising or not comprising probes and primers for the antimicrobial agents resistance genes listed in Table 5, and further comprising or not comprising probes and primers for the toxin genes listed in Table 6 are also objects of this invention.

[0062] In a preferred embodiment, such a kit allows for the separate or the simultaneous detection and identification of the above-listed microbial species or genus or family or group; or universal detection of algae, archaea, bacteria, fungi or parasites; or antimicrobial agents resistance genes; or toxin genes; or for the detection of any microorganism (algae, archaea, bacteria, fungi or parasites).

[0063] In the above methods and kits, probes and primers are not limited to nucleic acids and may include, but are not restricted to analogs of nucleotides such as: inosine, 3-nitropyrrole nucleosides (Nichols et al., 1994, Nature 369:492-493), Linked Nucleic Acids (LNA) (Koskin et al., 1998, Tetrahedron 54:3607-3630), and Peptide Nucleic Acids (PNA) (Egholm et al., 1993, Nature 365:566-568).

[0064] In the above methods and kits, amplification reactions may include but are not restricted to: a) polymerase chain reaction (PCR), b) ligase chain reaction (LCR), c) nucleic acid sequence-based amplification (NASBA), d) self-sustained sequence replication (3SR), e) strand displacement amplification (SDA), f) branched DNA signal amplification (bDNA), g) transcription-mediated amplification (TMA), h) cycling probe technology (CPT), i) nested PCR, j) multiplex PCR, k) solid phase amplification (SPA), 1) nuclease dependent signal amplification (NDSA), m) rolling circle amplification technology (RCA), n) Anchored strand displacement amplification, o) Solid-phase (immobilized) rolling circle amplification.

[0065] In the above methods and kits, detection of the nucleic acids of target genes may include real-time or post-amplification technologies. These detection technologies can include, but are not limited to, fluorescence resonance energy transfer (FRET)-based methods such as adjacent hybridization to FRET probes (including probe-probe and probe-primer methods), TaqMan, Molecular Beacons, scorpions, nanoparticle probes and Sunrise (Amplifluor). Other detection methods include target genes nucleic acids detection via immunological methods, solid phase hybridization methods on filters, chips or any other solid support, whether the hybridization is monitored by fluorescence, chemiluminescence, potentiometry, mass spectrometry, plasmon resonance, polarimetry, colorimetry, or scanometry. Sequencing, including sequencing by dideoxy termination or sequencing by hybridization, e.g. sequencing using a DNA chip, is another possible method to detect and identify the nucleic acids of target genes.

[0066] In a preferred embodiment, a PCR protocol is used for nucleic acid amplification, in diagnostic method as well as in method of construction of a repertory of nucleic acids and deduced sequences.

[0067] In a particularly preferred embodiment, a PCR protocol is provided, comprising, an initial denaturation step of 1-3 minutes at 95° C., followed by an amplification cycle including a denaturation step of one second at 95° C. and an annealing step of 30 seconds at 45-65° C., without any time allowed specifically for the elongation step. This PCR protocol has been standardized to be suitable for PCR reactions with most selected primer pairs, which greatly facilitates the testing because each clinical sample can be tested with universal, species-specific, genus-specific, antimicrobial agents resistance gene and toxin gene PCR primers under uniform cycling conditions. Furthermore, various combinations of primer pairs may be used in multiplex PCR assays.

[0068] It is also an object of the present invention that tuf, atpD and recA sequences could serve as drug targets and these sequences and means to obtain them revealed in the present invention can assist the screening, design and modeling of these drugs.

[0069] It is also an object of the present invention that tuf, atpD and recA sequences could serve for vaccine purposes and these sequences and means to obtain them revealed in the present invention can assist the screening, design and modeling of these vaccines.

[0070] We aim at developing a universal DNA-based test or kit to screen out rapidly samples which are free of algal, archaeal, bacterial, fungal or parasitical cells. This test could be used alone or combined with more specific identification tests to detect and identify the above algal and/or archaeal and/or bacterial and/or fungal and/or parasitical species and/or genera and/or family and/or group and to determine rapidly the bacterial resistance to antibiotics and/or presence of bacterial toxins. Although the sequences from the selected antimicrobial agents resistance genes are available from public databases and have been used to develop DNA-based tests for their detection, our approach is unique because it represents a major improvement over current diagnostic methods based on bacterial cultures. Using an amplification method for the simultaneous or independent or sequential microbial detection-identification and antimicrobial resistance genes detection, there is no need for culturing the clinical sample prior to testing. Moreover, a modified PCR protocol has been developed to detect all target DNA sequences in approximately one hour under uniform amplification conditions. This procedure should save lives by optimizing treatment, should diminish antimicrobial agents resistance because less antibiotics will be prescribed, should reduce the use of broad spectrum antibiotics which are expensive, decrease overall health care costs by preventing or shortening hospitalizations, and side effects of drugs, and decrease the time and costs associated with clinical laboratory testing.

[0071] In another embodiment, sequence repertories and ways to obtain them for other gene targets are also an object of this invention, such is the case for the hexA nucleic acids and/or sequences of Streptococci.

[0072] In yet another embodiment, for the detection of mutations associated with antibiotic resistance genes, we built repertories to distinguish between point mutations reflecting only gene diversity and point mutations involved in resistance. Such repertories and ways to obtain them for pbp1a, pbp2b and pbp2x genes of sensitive and penicillin-resistant Streptococcus pneumoniae and also for gyrA and parC gene fragments from various bacterial species are also an object of the present invention.

[0073] The diagnostic kits, primers and probes mentioned above can be used to identify algae, archaea, bacteria, fungi, parasites, antimicrobial agents resistance genes and toxin genes on any type of sample, whether said diagnostic kits, primers and probes are used for in vitro or in situ applications. The said samples may include but are not limited to: any clinical sample, any environment sample, any microbial culture, any microbial colony, any tissue, and any cell line.

[0074] It is also an object of the present invention that said diagnostic kits, primers and probes can be used alone or in conjunction with any other assay suitable to identify microorganisms, including but not limited to: any immunoassay, any enzymatic assay, any biochemical assay, any lysotypic assay, any serological assay, any differential culture medium, any enrichment culture medium, any selective culture medium, any specific assay medium, any identification culture medium, any enumeration culture medium, any cellular stain, any culture on specific cell lines, and any infectivity assay on animals.

[0075] In the methods and kits described herein below, the oligonucleotide probes and amplification primers have been derived from larger sequences (i.e. DNA fragments of at least 100 base pairs). All DNA fragments have been obtained either from proprietary fragments or from public databases. DNA fragments selected from public databases are newly used in a method of detection according to the present invention, since they have been selected for their diagnostic potential.

[0076] In another embodiment, the amino acid sequences translated from the repertory of tuf, atpD and recA nucleic acids and/or sequences are also an object of the present invention.

[0077] It is clear to the individual skilled in the art that other oligonucleotide sequences appropriate for (i) the universal detection of algae, archaea, bacteria, fungi or parasites, (ii) the detection and identification of the above microbial species or genus or family or group, and (iii) the detection of antimicrobial agents resistance genes, and (iv) the detection of toxin genes, other than those listed in Annexes I to III, XXI to XXII, XXXII to XXXVII, XXXIX to XLI, and XLIII to LIV may also be derived from the proprietary fragments or selected public database sequences. For example, the oligonucleotide primers or probes may be shorter or longer than the ones chosen; they may also be selected anywhere else in the proprietary DNA fragments or in the sequences selected from public databases; they may be also variants of the same oligonucleotide. If the target DNA or a variant thereof hybridizes to a given oligonucleotide, or if the target DNA or a variant thereof can be amplified by a given oligonucleotide PCR primer pair, the converse is also true; a given target DNA may hybridize to a variant oligonucleotide probe or be amplified by a variant oligonucleotide PCR primer. Alternatively, the oligonucleotides may be designed from any DNA fragment sequences for use in amplification methods other than PCR. Consequently, the core of this invention is the identification of universal, species-specific, genus-specific, family-specific, group-specific, resistance gene-specific, toxin gene-specific genomic or non-genomic DNA fragments which are used as a source of specific and ubiquitous oligonucleotide probes and/or amplification primers. Although the selection and evaluation of oligonucleotides suitable for diagnostic purposes requires much effort, it is quite possible for the individual skilled in the art to derive, from the selected DNA fragments, oligonucleotides other than the ones listed in Annexes I to III, XXI to XXII, XXXII to XXXVII, XXXIX to XLI, and XLIII to LIV which are suitable for diagnostic purposes. When a proprietary fragment or a public databases sequence is selected for its specificity and ubiquity, it increases the probability that subsets thereof will also be specific and ubiquitous.

[0078] Since a high percentage of clinical specimens are negative for bacteria (Table 3), DNA fragments having a high potential for the selection of universal oligonucleotide probes or primers were selected from proprietary and public database sequences. The amplification primers were selected from genes highly conserved in algae, archaea, bacteria, fungi and parasites, and are used to detect the presence of any algal, archaeal, bacterial, fungal or parasitical pathogen in clinical specimens in order to determine rapidly whether it is positive or negative for algae, archaea, bacteria, fungi or parasites. The selected genes, designated tuf, fus, atpD and recA, encode respectively 2 proteins (elongation factors Tu and G) involved in the translational process during protein synthesis, a protein (beta subunit) responsible for the catalytic activity of proton pump ATPase and a protein responsible for the homologous recombination of genetic material. The alignments of tuf, atpD and recA sequences used to derive the universal primers include both proprietary and public database sequences. The universal primer strategy allows the rapid screening of the numerous negative clinical specimens (around 80% of the specimens received, see Table 3) submitted for microbiological testing.

[0079] Table 4 provides a list of the archaeal, bacterial, fungal and parasitical species for which tuf and/or atpD and/or recA nucleic acids and/or sequences are revealed in the present invention. Tables 5 and 6 provide a list of antimicrobial agents resistance genes and toxin genes selected for diagnostic purposes. Table 7 provides the origin of tuf, atpD and recA nucleic acids and/or sequences listed in the sequence listing. Tables 8-10 and 12-14 provide lists of species used to test the specificity, ubiquity and sensitivity of some assays described in the examples. Table 11 provides a list of microbial species for which tuf and/or atpD and/or recA sequences are available in public databases. Table 15 lists the microorganisms identified by commercial systems. Tables 16-18 are part of Example 42, whereas Tables 19-20 are part of Example 43. Tables 21-22 illustrate Example 44, whereas Tables 23-25 illustrate Example 45.

### BRIEF DESCRIPTION OF THE DRAWINGS

[0080] FIGS. 1 and 2 illustrate the principal subdivisions of the tuf and atpD sequences repertories, respectively. For the design of primers and probes, depending on the needs, one may want to use the complete data set illustrated on the top of the pyramid or use only a subset illustrated by the different branching points. Smaller subdivisions, representing groups, families, genus and species, could even be made to extend to the bottom of the pyramid. Because the tuf and atpD sequences are highly conserved and evolved with each species, the design of primers and probes does not need to include all the sequences within the database or its subdivisions. As illustrated in Annexes IV to XX, XXIII to XXXI, XXXVIII and XLII, depending on the use, sequences from a limited number of species can be carefully selected to represent: i) only the main phylogenetic branches from which the intended probes and primers need to be differentiating, and ii) only the species for which they need to be matching. However, for ubiquity purposes, and especially for primers and probes identifying large groups of species (genus, family, group or universal, or sequencing primers), the more data is included into the sequence analysis, the better the probes and primers will be suitable for each particular intended use. Similarly, for specificity purposes, a larger data set (or repertory) ensures optimal primers and probes design by reducing the chance of employing nonspecific oligonucleotides.

[0081] FIG. 3 illustrates the approach used to design specific amplification primers from fusA as well as from the region between the end of fusA and the beginning of tuf in the streptomycin (str) operon (referred to as the fusA-tuf intergenic spacer in Table 7). Shown is a schematic organization of universal amplification primers (SEQ ID NOs. 1221-1229) in the str operon. Amplicon sizes are given in bases pairs. Drawing not to scale, as the fusA-tuf intergenic spacer size varies depending on the bacterial species. Indicated amplicon lengths are for E. coli.

[0082] FIGS. 4 to 6 are illustrations to Example 42, whereas FIGS. 7 to 10 illustrate Example 43. FIGS. 11 and 12 illustrate Example 44.

[0083] FIG. 4. Abridged multiple amino acid sequence alignment of the partial tuf gene products from selected species illustrated using the program Alscript. Residues highly conserved in bacteria are boxed in grey and gaps are represented with dots. Residues in reverse print are unique to the enterococcal tufB as well as to streptococcal and lactococcal tuf gene products. Numbering is based on E. coli EF-Tu and secondary structure elements of E. coli EF-Tu are represented by cylinders (α-helices) and arrows (β-strands).

[0084] FIG. 5. Distance matrix tree of bacterial EF-Tu based on amino acid sequence homology. The tree was constructed by the neighbor-joining method. The tree was rooted using archeal and eukaryotic EF-1α genes as the outgroup. The scale bar represents 5% changes in amino acid sequence, as determined by taking the sum of all of the horizontal lines connecting two species.

[0085] FIG. 6. Southern hybridization of BglII/XbaI digested genomic DNAs of some enterococci (except for E. casseliflavus and E. gallinarum whose genomic DNA was digested with BamHI/PvuII) using the tufA gene fragment of E. faecium as probes. The sizes of hybridizing fragments are shown in kilobases. Strains tested are listed in Table 16.

[0086] FIG. 7. Pantoea and Tatumella species specific signature indel in atpD genes. The nucleotide positions given are for E. coli atpD sequence (GenBank accession no. V00267). Numbering starts from the first base of the initiation codon.

[0087] FIG. 8: Trees based on sequence data from tuf (left side) and atpD (right side). The phylogenetic analysis was performed using the Neighbor-Joining method calculated using the Kimura two-parameter method. The value on each branch indicates the occurrence (%) of the branching order in 750 bootstrapped trees.

[0088] FIG. 9: Phylogenetic tree of members of the family Enterobacteriaceae based on tuf (a), atpD (b), and 16S rDNA (c) genes. Trees were generated by neighbor-joining method calculated using the Kimura two-parameter method. The value on each branch is the percentage of bootstrap replications supporting the branch. 750 bootstrap replications were calculated.

[0089] FIG. 10: Plot of tuf distances versus 16S rDNA distances (a), atpD distances versus 16S rDNA distances (b), and atpD distances versus tuf distances (c). Symbols: ◯, distances between pairs of strains belonging to the same species; , distances between E. coli strains and Shigella strains; □, distances between pairs belonging to the same genus; ▪, distances between pairs belonging to different genera; Δ, distances between pairs belonging to different families.

[0090] FIG. 11 depicts a multiple nucleic acid sequence alignment of the vanA gene from the indicated GenBank nucleotide accession numbers. Above the alignment of the GenBank sequences is a consensus sequence, derived from the alignment of the nucleic acid sequences below. Below the alignment of the GenBank sequences and shaded in grey are the sequences of oligonucleotides (SEQ ID NOs: 1090 and 1091) and the position of a molecular beacon probe (SEQ ID NO: 2299) that hybridizes to the amplification product of SEQ ID NOs: 1090 and 1091.

[0091] FIG. 12 depicts a multiple nucleic acid sequence alignment of the vanB gene from the indicated GenBank nucleotide accession numbers. Above the alignment of the GenBank sequences is a consensus sequence, derived from the alignment of the nucleic acid sequences below. Below the alignment of the GenBank sequences and shaded in grey are the sequences of oligonucleotides (SEQ ID NOs: 1096 and 2298) and the position of a molecular beacon probe (SEQ ID NO: 2300) that hybridizes to the amplification product of SEQ ID NOs: 1096 and 2298.

[0092] FIGS. 13A and 13B shows a graphical depictions of PCR amplification curves measured from reactions containing molecular beacon probes. Reactions contained 0, 0.5, 2.5, 5. 10, or 20 copies of vanA resistant E. faecium (FIG. 13A) or vanB resistant E. faecalis (FIG. 13B) template DNA, as well as 3.5 copies of internal control DNA. Molecular beacon probes (SEQ ID NO: 2299 and 2300) were added to each reaction and the fluorescence of the reactions was measured (FIGS. 13A and 13B, respectively). SEQ ID NO: 2299 is labeled with FAM. SEQ ID NO: 2300 is labeled with Texas Red. SEQ ID NO: 2301 is labeled with TET.

[0093] FIG. 14 shows an agarose gel of the DNA amplification products from PCR using the template DNA sources listed in Table 29. The numbers above the lanes correspond to the numbers in Table 29.

[0094] FIG. 15 shows an agarose gel of the DNA amplification products from PCR using template DNA sources listed in Table 30. The numbers above the lanes correspond to the numbers in Table 30.

[0095] FIG. 16 shows an agarose gel of the DNA amplification products from PCR using template DNA sources listed in Table 31. The numbers above the lanes correspond to the numbers in Table 31.

[0096] FIG. 17 shows an agarose gel of the DNA amplification products from PCR using template DNA sources listed in Table 32. The numbers above the lanes correspond to the numbers in Table 32.

[0097] FIGS. 18A and 18B show the fluorescence signal readout obtained in the FAM channel when vanA template (FIG. 18A) or non-specific template (FIG. 18B) DNA was used in PCR according to Example 23.

[0098] FIGS. 19A and 19B show the fluorescence signal readout obtained in the TET channel when internal control (IC) template (FIG. 19A) or non-specific template (FIG. 19B) DNA was used in PCR according to Example 23

[0099] FIGS. 20A and 20B show the fluorescence signal readout obtained in the Texas Red channel when vanB template (FIG. 20A) or non-specific template (FIG. 20B) DNA was used in the PCR according to Example 23.

[0100] FIG. 21 shows the fluorescent signal readout obtained in the vanR assay for a vanA positive clinical specimen. The top panel shows the fluorescent readout from the FAM channel, and the bottom panel shows the fluorescent readout in the Texas Red channel, designed to detect the vanB probe.

[0101] FIG. 22 shows the fluorescent signal readout obtained in the vanR assay for a clinical specimen that is both vanA and vanB positive. The top panel shows the readout from the FAM channel (vanA) and the bottom panel a shows the readout from the Texas Red channel (vanB).

[0102] FIG. 23 shows the fluorescent signal readout obtained in the vanR assay for a clinical specimen that is vanB positive. The top panel shows the FAM channel (vanA) and the bottom channel shows the fluorescent readout from the Texas Red channel (vanB).

[0103] FIG. 24 shows an agarose gel of the DNA amplification products from PCR using the template DNA sources listed in Table 36. The numbers above the lanes correspond to the numbers in Table 36.

[0104] FIG. 25 shows an agarose gel of the DNA amplification products from PCR using the template DNA sources listed in Table 37. The numbers above the lanes correspond to the numbers in Table 37.

### DETAILED DESCRIPTION OF THE PREFERRED EMBODIMENT

[0105] The present inventors reasoned that comparing the published Haemophilus influenzae and Mycoplasma genitalium genomes and searching for conserved genes could provide targets to develop useful diagnostic primers and probes. This sequence comparison is highly informative as these two bacteria are distantly related and most genes present in the minimal genome of M. genitalium are likely to be present in every bacterium. Therefore genes conserved between these two bacteria are likely to be conserved in all other bacteria.

[0106] Following the genomic comparison, it was found that several protein-coding genes were conserved in evolution. Highly conserved proteins included the translation elongation factors G (EF-G) and Tu (EF-Tu) and the β subunit of F₀F₁ type ATP-synthase, and to a lesser extent, the RecA recombinase. These four proteins coding genes were selected amongst the 20 most conserved genes on the basis that they all possess at least two highly conserved regions suitable for the design of universal amplification and sequencing primers. Moreover, within the fragment amplified by these primers, highly conserved and more variable regions are also present hence suggesting it might be possible to rapidly obtain sequence information from various microbial species to design universal as well as species-, genus-, family-, or group-specific primers and probes of potential use for the detection and identification and/or quantification of microorganisms.

[0107] Translation elongation factors are members of a family of GTP-binding proteins which intervene in the interactions of tRNA molecules with the ribosome machinery during essential steps of protein synthesis. The role of elongation factor Tu is to facilitate the binding of aminoacylated tRNA molecules to the A site of the ribosome. The eukaryotic, archaeal (archaebacterial) and algal homolog of EF-Tu is called elongation factor 1 alpha (EF-1α). All protein synthesis factors originated from a common ancestor via gene duplications and fusions (Cousineau et al., 1997, J. Mol. Evol. 45:661-670). In particular, elongation factor G (EF-G), although having a functional role in promoting the translocation of aminoacyl-tRNA molecules from the A site to the P site of the ribosome, shares sequence homologies with EF-Tu and is thought to have arisen from the duplication and fusion of an ancestor of the EF-Tu gene.

[0108] In addition, EF-Tu is known to be the target for antibiotics belonging to the elfamycin's group as well as to other structural classes (Anborgh and Parmeggiani, 1991, EMBO J. 10:779-784; Luiten et al., 1992, European patent application serial No. EP 0 466 251 A1). EF-G for its part, is the target of the antibiotic fusidic acid. In addition to its crucial activities in translation, EF-Tu has chaperone-like functions in protein folding, protection against heat denaturation of proteins and interactions with unfolded proteins (Caldas et al., 1998, J. Biol. Chem 273:11478-11482). Interestingly, a form of the EF-Tu protein has been identified as a dominant component of the periplasm of Neisseria gonorrhoeae (Porcella et al., 1996, Microbiology 142:2481-2489), hence suggesting that at least in some bacterial species, EF-Tu might be an antigen with vaccine potential.

[0109] F₀F₁ type ATP-synthase belongs to a superfamily of proton-translocating ATPases divided in three major families: P, V and F (Nelson and Taiz, 1989, TIBS 14:113-116). P-ATPases (or E₁-E₂ type) operate via a phosphorylated intermediate and are not evolutionarily related to the other two families. V-ATPases (or V₀V₁ type) are present on the vacuolar and other endomembranes of eukaryotes, on the plasma membrane of archaea (archaebacteria) and algae, and also on the plasma membrane of some eubacteria especially species belonging to the order Spirochaetales as well as to the Chlamydiaceae and Deinococcaceae families. F-ATPases (or F₀F₁ type) are found on the plasma membrane of most eubacteria, on the inner membrane of mitochondria and on the thylakoid membrane of chloroplasts. They function mainly in ATP synthesis. They are large multimeric enzymes sharing numerous structural and functional features with the V-ATPases. F and V-type ATPases have diverged from a common ancestor in an event preceding the appearance of eukaryotes. The β subunit of the F-ATPases is the catalytic subunit and it possesses low but significant sequence homologies with the catalytic A subunit of V-ATPases.

[0110] The translation elongation factors EF-Tu, EF-G and EF-1α and the catalytic subunit of F or V-types ATP-synthase, are highly conserved proteins sometimes used for phylogenetic analysis and their genes are also known to be highly conserved (Iwabe et al., 1989, Proc. Natl. Acad. Sci. USA 86:9355-9359, Gogarten et al., 1989, Proc. Natl. Acad. Sci. USA 86:6661-6665, Ludwig et al., 1993, Antonie van Leeuwenhoek 64:285-305).

[0111] A recent BLAST (Altschul et al., 1997, J. Mol. Biol. 215:403-410) search performed by the present inventors on the GenBank, European Molecular Biology Laboratory (EMBL), DNA Database of Japan (DDBJ) and specific genome project databases indicated that throughout bacteria, the EF-Tu and the β subunit of F₀F₁ type ATP-synthase genes may be more conserved than other genes that are well conserved between H. influenzae and M. genitalium.

[0112] The RecA recombinase is a multifunctional protein encoded by the recA gene. It plays a central role in homologous recombination, it is critical for the repair of DNA damage and it is involved in the regulation of the SOS system by promoting the proteolytic digestion of the LexA repressor. It is highly conserved in bacteria and could serve as a useful genetic marker to reconstruct bacterial phylogeny (Miller and Kokjohn, 1990, Annu. Rev. Microbiol. 44:365-394). Although RecA possesses some highly conserved sequence segments that we used to design universal primers aimed at sequencing the recA fragments, it is clearly not as well conserved EF-G, EF-Tu and (3 subunit of F₀F₁ type ATP-synthase. Hence, RecA may not be optimal for universal detection of bacteria with high sensitivity but it was chosen because preliminary data indicated that EF-G, EF-Tu and 1 subunit of F₀F₁ type ATP-synthase may sometimes be too closely related to find specific primer pairs that could discriminate between certain very closely related species and genera. While RecA, EF-G, EF-Tu and β subunit of F₀F₁ type ATP-synthase genes, possesses highly conserved regions suitable for the design of universal sequencing primers, the less conserved region between primers should be divergent enough to allow species-specific and genus-specific primers in those cases.

[0113] Thus, as targets to design primers and probes for the genetic detection of microorganisms, the present inventors have focused on the genes encoding these four proteins: tuf, the gene for elongation factor Tu (EF-Tu); fus, the gene for the elongation factor G (EF-G); atpD, the gene for β subunit of F₀F₁ type ATP-synthase; and recA, the gene encoding the RecA recombinase. In several bacterial genomes tuf is often found in two highly similar duplicated copies named tufA and tufB (Filer and Furano, 1981, J. Bacteriol. 148:1006-1011, Sela et al., 1989, J. Bacteriol. 171:581-584). In some particular cases, more divergent copies of the tuf genes can exist in some bacterial species such as some actinomycetes (Luiten et al. European patent application publication No. EP 0 446 251 A 1; Vijgenboom et al., 1994, Microbiology 140:983-998) and, as revealed as part of this invention, in several enterococcal species. In several bacterial species, tuf is organized in an operon with its homolog gene for the elongation factor G (EF-G) encoded by the fusA gene (FIG. 3). This operon is often named the str operon. The tuf, fus, atpD and recA genes were chosen as they are well conserved in evolution and have highly conserved stretches as well as more variable segments. Moreover, these four genes have eukaryotic orthologs which are described in the present invention as targets to identify fungi and parasites. The eukaryotic homolog of elongation factor Tu is called elongation factor 1-alpha (EF-1α) (gene name: tef, tef1, ef1, ef-1 or EF-1). In fungi, the gene for EF-1α occurs sometimes in two or more highly similar duplicated copies (often named tef1, tef 2, tef3 . . . ). In addition, eukaryotes have a copy of elongation factor Tu which is originating from their organelle genome ancestry (gene name: tuf1, tufM or tufA). For the purpose of the current invention, the genes for these four functionally and evolutionarily linked elongation factors (bacterial EF-Tu and EF-G, eukaryotic EF-1α, and organellar EF-Tu) will hereafter be designated as <<tuf nucleic acids and/or sequences>>. The eukaryotic (mitochondrial) F₀F₁ type ATP-synthase beta subunit gene is named atp2 in yeast. For the purpose of the current invention, the genes of catalytic sub-unit of either F or V-type ATP-synthase will hereafter be designated as <<atpD nucleic acids and/or sequences>>. The eukaryotic homologs of RecA are distributed in two families, typified by the Rad51 and Dmc1 proteins. Archaeal homologs of RecA are called RadA. For the purpose of the current invention, the genes corresponding to the latter proteins will hereafter be designated as <<recA nucleic acids and/or sequences>>.

[0114] In the description of this invention, the terms <<nucleic acids>> and <<sequences>> might be used interchangeably. However, <<nucleic acids>> are chemical entities while <<sequences>> are the pieces of information derived from (inherent to) these <<nucleic acids>>. Both nucleic acids and sequences are equivalently valuable sources of information for the matter pertaining to this invention.

[0115] Analysis of multiple sequence alignments of tuf and atpD sequences permitted the design of oligonucleotide primers (and probes) capable of amplifying (or hybridizing to) segments of tuf (and/or fus) and atpD genes from a wide variety of bacterial species (see Examples 1 to 4, 24 and 26, and Table 7). Sequencing and amplification primer pairs for tuf nucleic acids and/or sequences are listed in Annex I and hybridization probes are listed in Annexes III and XLVII. Sequencing and amplification primer pairs for atpD nucleic acids and/or sequences are listed in Annex II. Analysis of the main subdivisions of tuf and atpD sequences (see FIGS. 1 and 2) permitted to design sequencing primers amplifying specifically each of these subdivisions. It should be noted that these sequencing primers could also be used as universal primers. However, since some of these sequencing primers include several variable sequence (degenerated) positions, their sensitivity could be lower than that of universal primers developed for diagnostic purposes. Further subdivisions could be done on the basis of the various phyla where these genes are encountered.

[0116] Similarly, analysis of multiple sequence alignments of recA sequences present in the public databases permitted the design of oligonucleotide primers capable of amplifying segments of recA genes from a wide variety of bacterial species. Sequencing and amplification primer pairs for recA sequences are listed in Annex XXI. The main subdivisions of recA nucleic acids and/or sequences comprise recA, radA, rad51 and dmc1. Further subdivisions could be done on the basis of the various phyla where these genes are encountered.

[0117] The present inventor's strategy is to get as much sequence data information from the four conserved genes (tuf, fus, atpD and recA). This ensemble of sequence data forming a repertory (with subrepertories corresponding to each target gene and their main sequence subdivisions) and then using the sequence information of the sequence repertory (or subrepertories) to design primer pairs that could permit either universal detection of algae or archaea or bacteria or fungi or parasites, detection of a family or group of microorganism (e.g. Enterobacteriaceae), detection of a genus (e.g. Streptococcus) or finally a specific species (e.g. Staphylococcus aureus). It should be noted that for the purpose of the present invention a group of microorganisms is defined depending on the needs of the particular diagnostic test. It does not need to respect a particular taxonomical grouping or phylum. See Example 12 where primers were designed to amplify a group a bacteria consisting of the 17 major bacterial species encountered as contaminants of platelet concentrates. Also remark that in that Example, the primers are not only able to sensitively and rapidly detect at least the 17 important bacterial species, but could also detect other species as well, as shown in Table 14. In these circumstances the primers shown in Example 12 are considered universal for platelet-contaminating bacteria. To develop an assay specific for the latter, one or more primers or probes specific to each species could be designed. Another example of primers and/or probes for group detection is given by the Pseudomonad group primers. These primers were designed based upon alignment of tuf sequences from real Pseudomonas species as well as from former Pseudomonas species such as Stenotrophomonas maltophilia. The resulting primers are able to amplify all Pseudomonas species tested as well as several species belonging to different genera, hence as being specific for a group including Pseudomonas and other species, we defined that group as Pseudomonads, as several members were former Pseudomonas.

[0118] For certain applications, it may be possible to develop a universal, group, family or genus-specific reaction and to proceed to species identification using sequence information within the amplicon to design species-specific internal probes or primers, or alternatively, to proceed directly by sequencing the amplicon. The various strategies will be discussed further below.

[0119] The ensembles formed by public and proprietary tuf, atpD and recA nucleic acids and/or sequences are used in a novel fashion so they constitute three databases containing useful information for the identification of microorganisms.

[0120] Sequence repertories of other gene targets were also built to solve some specific identification problems especially for microbial species genetically very similar to each other such as E. coli and Shigella (see Example 23). Based on tuf, atpD and recA sequences, Streptococcus pneumoniae is very difficult to differentiate from the closely related species S. oralis and S. mitis. Therefore, we elected to built a sequence repertory from hexA sequences (Example 19), a gene much more variable than our highly conserved tuf, atpD and recA nucleic acids and/or sequences.

[0121] For the detection of mutations associated with antibiotic resistance genes, we also built repertories to distinguish between point mutations reflecting only gene diversity and point mutations involved in resistance. This was done for pbp1a, pbp2b and pbp2x genes of penicillin-resistant and sensitive Streptococcus pneumoniae (Example 18) and also for gyrA and parC gene fragments of various bacterial species for which quinolone resistance is important to monitor.

### Oligonucleotide Primers and Probes Design and Synthesis

[0122] The tuf, fus, atpD and recA DNA fragments sequenced by us and/or selected from public databases (GenBank and EMBL) were used to design oligonucleotides primers and probes for diagnostic purposes. Multiple sequence alignments were made using subsets of the tuf or atpD or recA sequences repertory. Subsets were chosen to encompass as much as possible of the targeted microorganism(s) DNA sequence data and also include sequence data from phylogenetically related microorganisms from which the targeted microorganism(s) should be distinguished. Regions suitable for primers and probes should be conserved for the targeted microorganism(s) and divergent for the microorganisms from which the targeted microorganism(s) should be distinguished. The large amount of tuf or atpD or recA sequences data in our repertory permits to reduce trial and errors in obtaining specific and ubiquitous primers and probes. We also relied on the corresponding peptide sequences of tuf, fus, atpD and recA nucleic acids and/or sequences to facilitate the identification of regions suitable for primers and probes design. As part of the design rules, all oligonucleotides (probes for hybridization and primers for DNA amplification by PCR) were evaluated for their suitability for hybridization or PCR amplification by computer analysis using standard programs (i.e. the Genetics Computer Group (GCG) programs and the primer analysis software Oligo™ 5.0). The potential suitability of the PCR primer pairs was also evaluated prior to the synthesis by verifying the absence of unwanted features such as long stretches of one nucleotide and a high proportion of G or C residues at the 3′ end (Persing et al., 1993, Diagnostic Molecular Microbiology: Principles and Applications, American Society for Microbiology, Washington, D.C.). Oligonucleotide probes and amplification primers were synthesized using an automated DNA synthesizer (Perkin-Elmer Corp., Applied Biosystems Division).

[0123] The oligonucleotide sequence of primers or probes may be derived from either strand of the duplex DNA. The primers or probes may consist of the bases A, G, C, or T or analogs and they may be degenerated at one or more chosen nucleotide position(s). The primers or probes may be of any suitable length and may be selected anywhere within the DNA sequences from proprietary fragments or from selected database sequences which are suitable for (i) the universal detection of algae or archaea or bacteria or fungi or parasites, (ii) the species-specific detection and identification of any microorganism, including but not limited to: Abiotrophia adiacens, Bacteroides fragilis, Bordetella pertussis, Candida albicans, Candida dubliniensis, Candida glabrata, Candida guilliermondii, Candida krusei, Candida lusitaniae, Candida parapsilosis, Candida tropicalis, Candida zeylanoides, Campylobacter jejuni and C. coli, Chlamydia pneumoniae, Chlamydia trachomatis, Cryptococcus neoformans, Cryptosporidium parvum, Enterococcus faecalis, Enterococcus faecium, Enterococcus gallinarum, Escherichia coli, Haemophilus influenzae, Legionella pneumophila, Mycoplasma pneumoniae, Neisseria gonorrhoeae, Pseudomonas aeruginosa, Staphylococcus aureus, Staphylococcus epidermidis, Staphylococcus haemolyticus, Staphylococcus hominis, Staphylococcus saprophyticus, Streptococcus agalactiae, Streptococcus pneumoniae, Trypanosoma brucei, Trypanosoma cruzi, (iii) the genus-specific detection of Bordetella species, Candida species, Clostridium species, Corynebacterium species, Cryptococcus species, Entamoeba species, Enterococcus species, Gemella species, Giardia species, Legionella species, Leishmania species, Staphylococcus species, Streptococcus species, Trypanosoma species, (iv) the family-specific detection of Enterobacteriaceae family members, Mycobacteriaceae family members, Trypanosomatidae family members, (v) the detection of Enterococcus casseliflavus-flavescens-gallinarum group, Enterococcus, Gemella and Abiotrophia adiacens group, Pseudomonads extended group, Platelet-contaminating bacteria group, (vi) the detection of clinically important antimicrobial agents resistance genes listed in Table 5, (vii) the detection of clinically important toxin genes listed in Table 6.

[0124] Variants for a given target microbial gene are naturally occurring and are attributable to sequence variation within that gene during evolution (Watson et al., 1987, Molecular Biology of the Gene, 4^{th} ed., The Benjamin/Cummings Publishing Company, Menlo Park, Calif.; Lewin, 1989, Genes IV, John Wiley & Sons, New York, N.Y.). For example, different strains of the same microbial species may have a single or more nucleotide variation(s) at the oligonucleotide hybridization site. The person skilled in the art is well aware of the existence of variant algal, archaeal, bacterial, fungal or parasitical DNA nucleic acids and/or sequences for a specific gene and that the frequency of sequence variations depends on the selective pressure during evolution on a given gene product. The detection of a variant sequence for a region between two PCR primers may be demonstrated by sequencing the amplification product. In order to show the presence of sequence variants at the primer hybridization site, one has to amplify a larger DNA target with PCR primers outside that hybridization site. Sequencing of this larger fragment will allow the detection of sequence variation at this site. A similar strategy may be applied to show variants at the hybridization site of a probe. Insofar as the divergence of the target nucleic acids and/or sequences or a part thereof does not affect the specificity and ubiquity of the amplification primers or probes, variant microbial DNA is under the scope of this invention. Variants of the selected primers or probes may also be used to amplify or hybridize to a variant DNA.

Sequencing of tuf Nucleic Acids and/or Sequences from a Variety of Archaeal, Bacterial, Fungal and Parasitical Species

[0125] The nucleotide sequence of a portion of tuf nucleic acids and/or sequences was determined for a variety of archaeal, bacterial, fungal and parasitical species. The amplification primers (SEQ ID NOs. 664 and 697), which amplify a tuf gene portion of approximately 890 bp, were used along with newly designed sequencing primer pairs (See Annex I for the sequencing primers for tuf nucleic acids and/or sequences). Most primer pairs can amplify different copies of tuf genes (tufA and tufB). This is not surprising since it is known that for several bacterial species these two genes are nearly identical. For example, the entire tufA and tufB genes from E. coli differ at only 13 nucleotide positions (Neidhardt et al., 1996, Escherichia coli and Salmonella: Cellular and Molecular Biology, 2^{nd} ed., American Society for Microbiology Press, Washington, D.C.). Similarly, some fungi are known to have two nearly identical copies of tuf nucleic acids and/or sequences (EF-1□). These amplification primers are degenerated at several nucleotide positions and contain inosines in order to allow the amplification of a wide range of tuf nucleic acids and/or sequences. The strategy used to select these amplification primers is similar to that illustrated in Annex I for the selection of universal primers. The tuf sequencing primers even sometimes amplified highly divergent copies of tuf genes (tufC) as illustrated in the case of some enterococcal species (SEQ ID NOs.: 73, 75, 76, 614 to 618, 621 and 987 to 989). To prove this, we have determined the enterococcal tuf nucleic acids and/or sequences from PCR amplicons cloned into a plasmid vector. Using the sequence data from the cloned amplicons, we designed new sequencing primers specific to the divergent (tufC) copy of enterococci (SEQ ID NOs.: 658-659 and 661) and then sequenced directly the tufC amplicons. The amplification primers (SEQ ID NOs.: 543, 556, 557, 643-645, 660, 664, 694, 696 and 697) could be used to amplify the tuf nucleic acids and/or sequences from any bacterial species. The amplification primers (SEQ ID NOs.: 558, 559, 560, 653, 654, 655, 813, 815, 1974-1984, 1999-2003) could be used to amplify the tuf (EF-1 □ genes from any fungal and/or parasitical species. The amplification primers SEQ ID NOs. 1221-1228 could be used to amplify bacterial tuf nucleic acids and/or sequences of the EF-G subdivision (fusA) (FIG. 3). The amplification primers SEQ ID NOs. 1224, and 1227-1229 could be used to amplify bacterial tuf nucleic acids and/or sequences comprising the end of EF-G (fusA) and the beginning of EF-Tu (tuf), including the intergenic region, as shown in FIG. 3.

[0126] Most tuf fragments to be sequenced were amplified using the following amplification protocol: One μl of cell suspension (or of purified genomic DNA 0.1-100 ng/μl) was transferred directly to 19 μl of a PCR reaction mixture. Each PCR reaction contained 50 mM KCl, 10 mM Tris-HCl (pH 9.0), 0.1% Triton X-100, 2.5 mM MgCl₂, 1 μM of each of the 2 primers, 200 μM of each of the four dNTPs, 0.5 unit of Taq DNA polymerase (Promega Corp., Madison, Wis.). PCR reactions were subjected to cycling using a PTC-200 thermal cycler (MJ Research Inc., Watertown, Mass.) as follows: 3 min at 94-96° C. followed by 30-45 cycles of 1 min at 95° C. for the denaturation step, 1 min at 50-55° C. for the annealing step and 1 min at 72° C. for the extension step. Subsequently, twenty microliters of the PCR-amplified mixture were resolved by electrophoresis in a 1.5% agarose gel. The amplicons were then visualized by staining with methylene blue (Flores et al., 1992, Biotechniques, 13:203-205). The size of the amplification products was estimated by comparison with a 100-bp molecular weight ladder. The band corresponding to the specific amplification product was excised from the agarose gel and purified using the QIAquick™ gel extraction kit (QIAGEN Inc., Chatsworth, Calif.). The gel-purified DNA fragment was then used directly in the sequencing protocol. Both strands of the tuf genes amplification product were sequenced by the dideoxynucleotide chain termination sequencing method by using an Applied Biosystems automated DNA sequencer (model 377) with their Big Dye™ Terminator Cycle Sequencing Ready Reaction Kit (Applied Biosystems, Foster City, Calif.). The sequencing reactions were performed by using the same amplification primers and 10 ng/100 by of the gel-purified amplicon per reaction. For the sequencing of long amplicons such as those of eukaryotic tuf (EF-1 □ nucleic acids and/or sequences, we designed internal sequencing primers (SEQ ID NOs.: 654, 655 and 813) to be able to obtain sequence data on both strands for most of the fragment length. In order to ensure that the determined sequence did not contain errors attributable to the sequencing of PCR artefacts, we have sequenced two preparations of the gel-purified tuf amplification product originating from two independent PCR amplifications. For most target microbial species, the sequences determined for both amplicon preparations were identical. In case of discrepancies, amplicons from a third independent PCR amplification were sequenced. Furthermore, the sequences of both strands were 100% complementary thereby confirming the high accuracy of the determined sequence. The tuf nucleic acids and/or sequences determined using the above strategy are described in the Sequence Listing. Table 7 gives the originating microbial species and the source for each tuf sequence in the Sequence Listing.

[0127] The alignment of the tuf sequences determined by us or selected from databases revealed clearly that the length of the sequenced portion of the tuf genes is variable. There may be insertions or deletions of several amino acids. In addition, in several fungi introns were observed. Intron nucleic acids and/or sequences are part of tuf nucleic acids and/or sequences and could be useful in the design of species-specific primers and probes. This explains why the size of the sequenced tuf amplification products was variable from one fungal species to another. Consequently, the nucleotide positions indicated on top of each of Annexes IV to XX, XXIII to XXXI, XXXVIII and XLII do not correspond for sequences having insertions or deletions.

[0128] It should also be noted that the various tuf nucleic acids and/or sequences determined by us occasionally contain base ambiguities. These degenerated nucleotides correspond to sequence variations between tufA and tufB genes (or copies of the EF-G subdivision of tuf nucleic acids and/or sequences, or copies of EF-1 □ subdivision of tuf nucleic acids and/or sequences for fungi and parasites) because the amplification primers amplify both tuf genes. These nucleotide variations were not attributable to nucleotide misincorporations by the Taq DNA polymerase because the sequence of both strands was identical and also because the sequences determined with both preparations of the gel-purified tuf amplicons obtained from two independent PCR amplifications were identical.

The Selection of Amplification Primers from Tuf Nucleic Acids and/or Sequences

[0129] The tuf sequences determined by us or selected from public databases were used to select PCR primers for universal detection of bacteria, as well as for genus-specific, species-specific family-specific or group-specific detection and identification. The strategy used to select these PCR primers was based on the analysis of multiple sequence alignments of various tuf sequences. For more details about the selection of PCR primers from tuf sequences please refer to Examples 5, 7-14, 17, 22, 24, 28, 30-31, 33, 36, and 38-40, and to Annexes VI-IX, XI-XIX and XXV.

Sequencing of atpD and recA Nucleic Acids and/or Sequences from a Variety of Archaeal, Bacterial, Fungal and Parasitical Species

[0130] The method used to obtain atpD and recA nucleic acids and/or sequences is similar to that described above for tuf nucleic acids and/or sequences.

The Selection of Amplification Primers from atpD or recA Nucleic Acids and/or Sequences

[0131] The comparison of the nucleotide sequence for the atpD or recA genes from various archaeal, bacterial, fungal and parasitical species allowed the selection of PCR primers (refer to Examples 6, 13, 29, 34 and 37, and to Annexes IV, V, X, and XX).

### DNA Amplification

[0132] For DNA amplification by the widely used PCR (polymerase chain reaction) method, primer pairs were derived from proprietary DNA fragments or from database sequences. Prior to synthesis, the potential primer pairs were analyzed by using the Oligo™ 5.0 software to verify that they were good candidates for PCR amplification.

[0133] During DNA amplification by PCR, two oligonucleotide primers binding respectively to each strand of the heat-denatured target DNA from the microbial genome are used to amplify exponentially in vitro the target DNA by successive thermal cycles allowing denaturation of the DNA, annealing of the primers and synthesis of new targets at each cycle (Persing et al, 1993, Diagnostic Molecular Microbiology: Principles and Applications, American Society for Microbiology, Washington, D.C.).

[0134] Briefly, the PCR protocols were as follows: Treated clinical specimens or standardized bacterial or fungal or parasitical suspensions (see below) or purified genomic DNA from bacteria, fungi or parasites were amplified in a 20 μl PCR reaction mixture. Each PCR reaction contained 50 mM KCl, 10 mM Tris-HCl (pH 9.0), 2.5 mM MgCl₂, 0.4 μM of each primer, 200 μM of each of the four dNTPs and 0.5 unit of Taq DNA polymerase (Promega) combined with the TaqStart™ antibody (Clontech Laboratories Inc., Palo Alto, Calif.). The TaqStart™ antibody, which is a neutralizing monoclonal antibody to Taq DNA polymerase, was added to all PCR reactions to enhance the specificity and the sensitivity of the amplifications (Kellogg et al., 1994, Biotechniques 16:1134-1137). The treatment of the clinical specimens varies with the type of specimen tested, since the composition and the sensitivity level required are different for each specimen type. It consists in a rapid protocol to lyse the microbial cells and eliminate or neutralize PCR inhibitors. For amplification from bacterial or fungal or parasitical cultures or from purified genomic DNA, the samples were added directly to the PCR amplification mixture without any pre-treatment step. An internal control was derived from sequences not found in the target microorganisms or in the human genome. The internal control was integrated into all amplification reactions to verify the efficiency of the PCR assays and to ensure that significant PCR inhibition was absent. Alternatively, an internal control derived from rRNA was also useful to monitor the efficiency of microbial lysis protocols.

[0135] PCR reactions were then subjected to thermal cycling (3 min at 94-96° C. followed by 30 cycles of 1 second at 95° C. for the denaturation step and 30 seconds at 50-65° C. for the annealing-extension step) using a PTC-200 thermal cycler (MJ Research Inc.). The number of cycles performed for the PCR assays varies according to the sensitivity level required. For example, the sensitivity level required for microbial detection directly from clinical specimens is higher for blood specimens than for urine specimens because the concentration of microorganisms associated with a septicemia can be much lower than that associated with a urinary tract infection. Consequently, more sensitive PCR assays having more thermal cycles are probably required for direct detection from blood specimens. Similarly, PCR assays performed directly from bacterial or fungal or parasitical cultures may be less sensitive than PCR assays performed directly from clinical specimens because the number of target organisms is normally much lower in clinical specimens than in microbial cultures.

[0136] The person skilled in the art of DNA amplification knows the existence of other rapid amplification procedures such as ligase chain reaction (LCR), transcription-mediated amplification (TMA), self-sustained sequence replication (3SR), nucleic acid sequence-based amplification (NASBA), strand displacement amplification (SDA), branched DNA (bDNA), cycling probe technology (CPT), solid phase amplification (SPA), rolling circle amplification technology (RCA), solid phase RCA, anchored SDA and nuclease dependent signal amplification (NDSA) (Lee et al., 1997, Nucleic Acid Amplification Technologies: Application to Disease Diagnosis, Eaton Publishing, Boston, Mass.; Persing et al., 1993, Diagnostic Molecular Microbiology: Principles and Applications, American Society for Microbiology, Washington, D.C.; Westin et al., 2000, Nat. Biotechnol. 18:199-204). The scope of this invention is not limited to the use of amplification by PCR, but rather includes the use of any rapid nucleic acid amplification method or any other procedure which may be used to increase the sensitivity and/or the rapidity of nucleic acid-based diagnostic tests. The scope of the present invention also covers the use of any nucleic acids amplification and detection technology including real-time or post-amplification detection technologies, any amplification technology combined with detection, any hybridization nucleic acid chips or arrays technologies, any amplification chips or combination of amplification and hybridization chips technologies. Detection and identification by any sequencing method is also under the scope of the present invention.

[0137] Any oligonucleotide suitable for the amplification of nucleic acids by approaches other than PCR or for DNA hybridization which are derived from the species-specific, genus-specific and universal DNA fragments as well as from selected antimicrobial agents resistance or toxin gene sequences included in this document are also under the scope of this invention.

### Detection of Amplification Products

[0138] Classically, detection of amplification is performed by standard ethidium bromide-stained agarose gel electrophoresis. It is clear that other methods for the detection of specific amplification products, which may be faster and more practical for routine diagnosis, may be used. Such methods may be based on the detection of fluorescence after or during amplification. One simple method for monitoring amplified DNA is to measure its rate of formation by measuring the increase in fluorescence of intercalating agents such as ethidium bromide or SYBR® Green I (Molecular Probes). If more specific detection is required, fluorescence-based technologies can monitor the appearance of a specific product during the reaction. The use of dual-labeled fluorogenic probes such as in the TaqMan™ system (Applied Biosystems) which utilizes the 5′-3′ exonuclease activity of the Taq polymerase is a good example (Livak K. J. et al. 1995, PCR Methods Appl. 4:357-362). TaqMan™ can be performed during amplification and this “real-time” detection can be done in a single closed tube hence eliminating post-PCR sample handling and consequently preventing the risk of amplicon carryover. Several other fluorescence-based detection methods can be performed in real-time. Fluorescence resonance energy transfer (FRET) is the principle behind the use of adjacent hybridization probes (Wittwer, C. T. et al. 1997. BioTechniques 22:130-138), molecular beacons (Tyagi S. and Kramer F. R. 1996. Nature Biotechnology 14:303-308) and scorpions (Whitcomb et al. 1999. Nature Biotechnology 17:804-807). Adjacent hybridization probes are designed to be internal to the amplification primers. The 3′ end of one probe is labelled with a donor fluorophore while the 5′ end of an adjacent probe is labelled with an acceptor fluorophore. When the two probes are specifically hybridized in closed proximity (spaced by 1 to 5 nucleotides) the donor fluorophore which has been excited by an external light source emits light that is absorbed by a second acceptor that emit more fluorescence and yields a FRET signal. Molecular beacons possess a stem-and-loop structure where the loop is the probe and at the bottom of the stem a fluorescent moiety is at one end while a quenching moiety is at the other end. The beacons undergo a fluorogenic conformational change when they hybridize to their targets hence separating the fluorochrome from its quencher. The FRET principle is also used in an air thermal cycler with a built-in fluorometer (Wittwer, C. T. et al. 1997. BioTechniques 22:130-138). The amplification and detection are extremely rapid as reactions are performed in capillaries: it takes only 18 min to complete 45 cycles. Those techniques are suitable especially in the case where few pathogens are searched for. Boehringer-Roche Inc. sells the LightCycler™, and Cepheid makes the SmartCycler. These two apparatus are capable of rapid cycle PCR combined with fluorescent SYBR® Green I or FRET detection. We recently demonstrated in our laboratory, real-time detection of 10 CFU in less than 40 minutes using adjacent hybridization probes on the LightCycler™. Methods based on the detection of fluorescence are particularly promising for utilization in routine diagnosis as they are very rapid, quantitative and can be automated.

[0139] Microbial pathogens detection and identification may also be performed by solid support or liquid hybridization using species-specific internal DNA probes hybridizing to an amplification product. Such probes may be generated from any sequence from our repertory and designed to specifically hybridize to DNA amplification products which are objects of the present invention. Alternatively, the internal probes for species or genus or family or group detection and identification may be derived from the amplicons produced by a universal, family-, group-, genus- or species-specific amplification assay(s). The oligonucleotide probes may be labeled with biotin or with digoxigenin or with any other reporter molecule (for more details see below the section on hybrid capture). Hybridization on a solid support is amendable to miniaturization.

[0140] At present the oligonucleotide nucleic acid microarray technology is appealing. Currently, available low to medium density arrays (Heller et al., An integrated microelectronics hybridization system for genomic research and diagnostic applications. In: Harrison, D. J., and van den Berg, A., 1998, Micro total analysis systems '98, Kluwer Academic Publisher, Dordrecht.) could specifically capture fluorescent-labelled amplicons. Detection methods for hybridization are not limited to fluorescence; potentiometry, colorimetry and plasmon resonance are some examples of alternative detection methods. In addition to detection by hybridization, nucleic acid microarrays could be used to perform rapid sequencing by hybridization. Mass spectrometry could also be applicable for rapid identification of the amplicon or even for sequencing of the amplification products (Chiu and Cantor, 1999, Clinical Chemistry 45:1578; Berkenkamp et al., 1998, Science 281:260).

[0141] For the future of our assay format, we also consider the major challenge of molecular diagnostics tools, i.e.: integration of the major steps including sample preparation, genetic amplification, detection, data analysis and presentation (Anderson et al., Advances in integrated genetic analysis. In: Harrison, D. J., and van den Berg, A., 1998, Micro total analysis systems '98, Kluwer Academic Publisher, Dordrecht.).

[0142] To ensure PCR efficiency, glycerol, dimethyl sulfoxide (DMSO) or other related solvents can be used to increase the sensitivity of the PCR and to overcome problems associated with the amplification of a target DNA having a high GC content or forming strong secondary structures (Dieffenbach and Dveksler, 1995, PCR Primer: A Laboratory Manual, Cold Spring Harbor Laboratory Press, Plainview, N.Y.). The concentration ranges for glycerol and DMSO are 5-15% (v/v) and 3-10% (v/v), respectively. For the PCR reaction mixture, the concentration ranges for the amplification primers and MgCl₂ are 0.1-1.5 μM and 1.0-10.0 mM, respectively. Modifications of the standard PCR protocol using external and nested primers (i.e. nested PCR) or using more than one primer pair (i.e. multiplex PCR) may also be used (Persing et al., 1993, Diagnostic Molecular Microbiology: Principles and Applications, American Society for Microbiology, Washington, D.C.). For more details about the PCR protocols and amplicon detection methods, see Examples.

### Hybrid Capture and Chemiluminescence Detection of Amplification Products

[0143] Hybridization and detection of amplicons by chemiluminescence were adapted from Nikiforov et al. (1994, PCR Methods and Applications 3:285-291 and 1995, Anal. Biochem. 227:201-209) and from the DIG™ system protocol of Boehringer Mannheim. Briefly, 0.50 μl of a 25 picomoles solution of capture probe diluted in EDC {1-ethyl-3-(3-dimethylaminopropyl) carbodiimide hydrochloride) are immobilized in each well of 96-wells plates (Microlite™ 2, Dynex) by incubation overnight at room temperature. The next day, the plates are incubated with a solution of 1% BSA diluted into TNTw (10 mM Tris-HCl, pH 7.5; 150 mM NaCl; 0.05% Tween™. 20) for 1 hour at 37° C. The plates are then washed on a Wellwash Ascent™ (Labsystems) with TNTw followed by Washing Buffer (100 mM maleic acid pH7.5; 150 mM NaCl; 0.3% Tween™ 20).

[0144] The amplicons were labelled with DIG-11-dUTP during PCR using the PCR DIG Labelling Mix from Boehringer Mannheim according to the manufacturer's instructions. Hybridization of the amplicons to the capture probes is performed in triplicate at stringent temperature (generally, probes are designed to allow hybridization at 55° C., the stringent temperature) for 30 minutes in 1.5 M NaCl; 10 mM EDTA. It is followed by two washes in 2×SSC; 0.1% SDS, then by four washes in 0.1×SSC; 0.1% SDS at the stringent temperature (55° C.). Detection with 1,2 dioxetane chemiluminescent alkaline phosphatase substrates like CSPD® (Tropix Inc.) is performed according to the manufacturer's instructions but with shorter incubations times and a different antibody concentration. The plates are agitated at each step, the blocking incubation is performed for only 5 minutes, the anti-DIG-AP1 is used at a 1:1000 dilution, the incubation with antibody lasts 15 minutes, the plates are washed twice for only 5 minutes. Finally, after a 2 minutes incubation into the detection buffer, the plates are incubated 5 minutes with CSPD® at room temperature followed by a 10 minutes incubation at 37° C. without agitation. Luminous signal detection is performed on a Dynex Microtiter Plate Luminometer using RLU (Relative Light Units).

### Specificity, Ubiquity and Sensitivity Tests for Oligonucleotide Primers and Probes

[0145] The specificity of oligonucleotide primers and probes was tested by amplification of DNA or by hybridization with bacterial or fungal or parasitical species selected from a panel comprising closely related species and species sharing the same anatomo-pathological site (see Annexes and Examples). All of the bacterial, fungal and parasitical species tested were likely to be pathogens associated with infections or potential contaminants which can be isolated from clinical specimens. Each target DNA could be released from microbial cells using standard chemical and/or physical treatments to lyse the cells (Sambrook et al., 1989, Molecular Cloning: A Laboratory Manual, 2^{nd} ed., Cold Spring Harbor Laboratory Press, Cold Spring Harbor, N.Y.) or alternatively, genomic DNA purified with the GNOME™ DNA kit (Bio101, Vista, Calif.) was used. Subsequently, the DNA was subjected to amplification with the primer pairs. Specific primers or probes amplified only the target microbial species, genus, family or group.

[0146] Oligonucleotides primers found to amplify specifically the target species, genus, family or group were subsequently tested for their ubiquity by amplification (i.e. ubiquitous primers amplified efficiently most or all isolates of the target species or genus or family or group). Finally, the sensitivity of the primers or probes was determined by using 10-fold or 2-fold dilutions of purified genomic DNA from the targeted microorganism. For most assays, sensitivity levels in the range of 1-100 copies were obtained. The specificity, ubiquity and sensitivity of the PCR assays using the selected amplification primer pairs were tested either directly from cultures of microbial species or from purified microbial genomic DNA.

[0147] Probes were tested in hybrid capture assays as described above. An oligonucleotide probe was considered specific only when it hybridized solely to DNA from the species or genus or family or group from which it was selected. Oligonucleotide probes found to be specific were subsequently tested for their ubiquity (i.e. ubiquitous probes detected efficiently most or all isolates of the target species or genus or family or group) by hybridization to microbial DNAs from different clinical isolates of the species or genus or family or group of interest including ATCC reference strains. Similarly, oligonucleotide primers and probes could be derived from antimicrobial agents resistance or toxin genes which are objects of the present invention.

### Reference Strains

[0148] The reference strains used to build proprietary tuf, atpD and recA sequence data subrepertories, as well as to test the amplification and hybridization assays were obtained from (i) the American Type Culture Collection (ATCC), (ii) the Laboratoire de santé publique du Québec (LSPQ), (iii) the Centers for Disease Control and Prevention (CDC), (iv) the National Culture Type Collection (NCTC) and (v) several other reference laboratories throughout the world. The identity of our reference strains was confirmed by phenotypic testing and reconfirmed by analysis of tuf, atpD and recA sequences (see Example 13).

### Antimicrobial Agents Resistance Genes

[0149] Antimicrobial resistance complicates treatment and often leads to therapeutic failures. Furthermore, overuse of antibiotics inevitably leads to the emergence of microbial resistance. Our goal is to provide clinicians, in approximately one hour, the needed information to prescribe optimal treatments. Besides the rapid identification of negative clinical specimens with DNA-based tests for universal algal, archaeal, bacterial, fungal or parasitical detection and the identification of the presence of a specific pathogen in the positive specimens with species- and/or genus- and/or family- and/or group-specific DNA-based tests, clinicians also need timely information about the ability of the microbial pathogen to resist antibiotic treatments. We feel that the most efficient strategy to evaluate rapidly microbial resistance to antimicrobials is to detect directly from the clinical specimens the most common and clinically important antimicrobial agents resistance genes (i.e. DNA-based tests for the specific detection of antimicrobial agents resistance genes). Since the sequence from the most important and common antimicrobial agents resistance genes are available from public databases, our strategy is to use the sequence from a portion or from the entire resistance gene to design specific oligonucleotide primers or probes which will be used as a basis for the development of sensitive and rapid DNA-based tests. The list of each of the antimicrobial agents resistance genes selected on the basis of their clinical relevance (i.e. high incidence and importance) is given in Table 5; descriptions of the designed amplification primers and internal probes are given in Annexes XXXIV-XXXVII, XXXIX, XLV, and L-LI. Our approach is unique because the antimicrobial agents resistance genes detection and the microbial detection and identification can be performed simultaneously, or independently, or sequentially in multiplex or parallel or sequential assays under uniform PCR amplification conditions. These amplifications can also be done separately.

### Toxin Genes

[0150] Toxin identification is often very important to prescribe optimal treatments. Besides the rapid identification of negative clinical specimens with DNA-based tests for universal bacterial detection and the identification of the presence of a specific pathogen in the positive specimens with species- and/or genus- and/or family- and/or group-specific DNA-based tests, clinicians sometimes need timely information about the ability of certain bacterial pathogens to produce toxins. Since the sequence from the most important and common bacterial toxin genes are available from public databases, our strategy is to use the sequence from a portion or from the entire toxin gene to design specific oligonucleotide primers or probes which will be used as a basis for the development of sensitive and rapid DNA-based tests. The list of each of the bacterial toxin genes selected on the basis of their clinical relevance (i.e. high incidence and importance) is given in Table 6; descriptions of the designed amplification primers and internal probes are given in Annexes XXII, XXXII and XXXIII. Our approach is unique because the toxin genes detection and the bacterial detection and identification can be performed simultaneously, or independently, or sequentially, in multiplex or parallel or sequential assays under uniform PCR amplification conditions. These amplifications can also be done separately.

### Universal Bacterial Detection

[0151] In the routine microbiology laboratory, a high percentage of clinical specimens sent for bacterial identification are negative by culture. Testing clinical samples with universal amplification primers or universal probes to detect the presence of bacteria prior to specific identification and screening out the numerous negative specimens is thus useful as it reduces costs and may rapidly orient the clinical management of the patients. Several amplification primers and probes were therefore synthesized from highly conserved portions of bacterial sequences from the tuf, atpD and recA nucleic acids and/or sequences. The universal primers selection was based on a multiple sequence alignment constructed with sequences from our repertory.

[0152] All computer analysis of amino acid and nucleotide sequences were performed by using the GCG programs. Subsequently, optimal PCR primers for the universal amplification of bacteria were selected with the help of the Oligo™ program. The selected primers are degenerated at several nucleotide positions and contain several inosines in order to allow the amplification of all clinically relevant bacterial species. Inosine is a nucleotide analog able to specifically bind to any of the four nucleotides A, C, G or T. Degenerated oligonucleotides consist of an oligonucleotide mix having two or more of the four nucleotides A, C, G or T at the site of mismatches. The inclusion of inosine and/or of base ambiguities in the amplification primers allow mismatch tolerance thereby permitting the amplification of a wider array of target nucleotide sequences (Dieffenbach and Dveksler, 1995 PCR Primer: A Laboratory Manual, Cold Spring Harbor Laboratory Press, Plainview, N.Y.).

[0153] The amplification conditions with the universal primers are very similar to those used for the species- and genus-specific amplification assays except that the annealing temperature is slightly lower. The original universal PCR assay described in our assigned WO98/20157 (SEQ ID NOs. 23-24 of the latter application) was specific and nearly ubiquitous for the detection of bacteria. The specificity for bacteria was verified by amplifying genomic DNA isolated from the 12 fungal species as well as genomic DNA from Leishmania donovani, Saccharomyces cerevisiae and human lymphocytes. None of the above eukaryotic DNA preparations could be amplified by the universal assay, thereby suggesting that this test is specific for bacteria. The ubiquity of the universal assay was verified by amplifying genomic DNAs from 116 reference strains which represent 95 of the most clinically relevant bacterial species. These species have been selected from the bacterial species listed in Table 4. We found that at least 104 of these strains could be amplified. However, the assay could be improved since bacterial species which could not be amplified with the original tuf nucleic acids and/or sequences-based assay included species belonging to the following genera: Corynebacterium (11 species) and Stenotrophomonas (1 species). Sequencing of the tuf genes from these bacterial species and others has been performed in the scope of the present invention in order to improve the universal assay. This sequencing data has been used to select new universal primers which may be more ubiquitous and more sensitive. Also, we improved our primer and probes design strategy by taking into consideration the phylogeny observed in analysing our repertory of tuf, atpD and recA sequences. Data from each of the 3 main subrepertories (tuf, atpD and recA) was subjected to a basic phylogenic analysis using the Pileup command from version 10 of the GCG package (Genetics Computer Group, inc.). This analysis indicated the main branches or phyla reflecting the relationships between sequences. Instead of trying to design primers or probes able to hybridize to all phyla, we designed primers or probes able to hybridize to the main phyla while trying to use the largest phylum possible. This strategy should allow less degenerated primers hence improving sensitivity and by combining primers in a multiplex assay, improve ubiquity. Universal primers SEQ ID NOs. 643-645 based on tuf sequences have been designed to amplify most pathogenic bacteria except Actinomyceteae, Clostridiaceae and the Cytophaga, Flexibacter and Bacteroides phylum (pathogenic bacteria of this phylum include mostly Bacteroides, Porphyromonas and Prevotella species). Primers to fill these gaps have been designed for Actinomyceteae (SEQ ID NOs. 646-648), Clostridiaceae (SEQ ID NOs. 796-797, 808-811), and the Cytophaga, Flexibacter and Bacteroides phylum (SEQ ID NOs. 649-651), also derived from tuf nucleic acids and/or sequences. These primers sets could be used alone or in conjunction to render the universal assay more ubiquitous.

[0154] Universal primers derived from atpD sequences include SEQ ID NOs. 562-565. Combination of these primers does not amplify human DNA but should amplify almost all pathogenic bacterial species except proteobacteria belonging to the epsilon subdivision (Campylobacter and Helicobacter), the bacteria from the Cytophaga, Flexibacter and Bacteroides group and some actinomycetes and corynebacteria. By analysing atpD sequences from the latter species, primers and probes to specifically fill these gaps could be designed and used in conjunction with primers SEQ ID NOs. 562-565, also derived from atpD nucleic acids and/or sequences.

[0155] In addition, universality of the assay could be expanded by mixing atpD sequences-derived primers with tuf sequences-derived primers. Ultimately, even recA sequences-derived primers could be added to fill some gaps in the universal assay.

[0156] It is important to note that the 95 bacterial species selected to test the ubiquity of the universal assay include all of the most clinically relevant bacterial species associated with a variety of human infections acquired in the community or in hospitals (nosocomial infections). The most clinically important bacterial and fungal pathogens are listed in Tables 1 and 2.

Amino Acid Sequences Derived from tuf, atpD and recA Nucleic Acids and/or Sequences

[0157] The amino acid sequences translated from the repertory of tuf, atpD and recA nucleic acids and/or sequences are also an object of the present invention. The amino acid sequence data will be particularly useful for homology modeling of three-dimensional (3D) structure of the elongation factor Tu, elongation factor G, elongation factor 1α, ATPase subunit beta and RecA recombinase. For all these proteins, at least one structure model has been published using X-ray diffraction data from crystals. Based on those structural informations it is possible to use computer software to build 3D model structures for any other protein having peptide sequence homologies with the known structure (Greer, 1991, Methods in Enzymology, 202:239-252; Taylor, 1994, Trends Biotechnol., 12(5):154-158; Sali, 1995, Curr. Opin. Biotechnol. 6:437-451; Sanchez and Sali, 1997, Curr. Opin. Struct. Biol. 7:206-214; Fischer and Eisenberg, 1999, Curr. Opin. Struct. Biol. 9:208-211; Guex et al., 1999, Trends Biochem. Sci. 24: 364-367). Model structures of target proteins are used for the design or to predict the behavior of ligands and inhibitors such as antibiotics. Since EF-Tu and EF-G are already known as antibiotic targets (see above) and since the beta subunit of ATPase and RecA recombinase are essential to the survival of the microbial cells in natural conditions of infection, all four proteins could be considered antibiotic targets. Sequence data, especially the new data generated by us could be very useful to assist the creation of new antibiotic molecules with desired spectrum of activity. In addition, model structures could be used to improve protein function for commercial purposes such as improving antibiotic production by microbial strains or increasing biomass.

[0158] The following detailed embodiments and appended drawings are provided as illustrative examples of his invention, with no intention to limit the scope thereof.

### EXAMPLES AND ANNEXES

[0159] For sake of clarity, here is a list of Examples and Annexes:

[0160] Example 1: Sequencing of bacterial atpD (F-type and V-type) gene fragments.

[0161] Example 2: Sequencing of eukaryotic atpD (F-type and V-type) gene fragments.

[0162] Example 3: Sequencing of eukaryotic tuf (EF-1) gene fragments.

[0163] Example 4: Sequencing of eukaryotic tuf (organelle origin, M) gene fragments.

[0164] Example 5: Specific detection and identification of Streptococcus agalactiae using tuf sequences.

[0165] Example 6: Specific detection and identification of Streptococcus agalactiae using atpD sequences.

[0166] Example 7: Development of a PCR assay for detection and identification of staphylococci at genus and species levels.

[0167] Example 8: Differentiating between the two closely related yeast species Candida albicans and Candida dubliniensis.

[0168] Example 9: Specific detection and identification of Entamoeba histolytica.

[0169] Example 10: Sensitive detection and identification of Chlamydia trachomatis.

[0170] Example 11: Genus-specific detection and identification of enterococci.

[0171] Example 12: Detection and identification of the major bacterial platelets contaminants using tuf sequences with a multiplex PCR test.

[0172] Example 13: The resolving power of the tuf and atpD sequences databases is comparable to the biochemical methods for bacterial identification.

[0173] Example 14: Detection of group B streptococci from clinical specimens.

[0174] Example 15: Simultaneous detection and identification of Streptococcus pyogenes and its pyrogenic exotoxin A.

[0175] Example 16: Real-time detection and identification of Shiga toxin-producing bacteria.

[0176] Example 17: Development of a PCR assay for the detection and identification of staphylococci at genus and species levels and its associated mecA gene.

[0177] Example 18: Sequencing of pbp1a, pbp2b and pbp2x genes of Streptococcus pneumoniae.

[0178] Example 19: Sequencing of hexA genes of Streptococcus species.

[0179] Example 20: Development of a multiplex PCR assay for the detection of Streptococcus pneumoniae and its penicillin resistance genes.

[0180] Example 21: Sequencing of the vancomycin resistance vanA, vanC1, vanC2 and vanC3 genes.

[0181] Example 22: Development of a PCR assay for the detection and identification of enterococci at genus and species levels and its associated resistance genes vanA and vanB.

[0182] Example 23: Development of a multiplex PCR assay for detection and identification of vancomycin-resistant Enterococcus faecalis, Enterococcus faecium, Enterococcus gallinarum, Enterococcus casseliflavus, and Enterococcus flavescens.

[0183] Example 24: Universal amplification involving the EF-G (fusA) subdivision of tuf sequences.

[0184] Example 25: DNA fragment isolation from Staphylococcus saprophyticus by arbitrarily primed PCR.

[0185] Example 26: Sequencing of prokaryotic tuf gene fragments.

[0186] Example 27: Sequencing of procaryotic recA gene fragments.

[0187] Example 28: Specific detection and identification of Escherichia coli/Shigella sp. using tuf sequences.

[0188] Example 29: Specific detection and identification of Klebsiella pneumoniae using atpD sequences.

[0189] Example 30: Specific detection and identification of Acinetobacter baumanii using tuf sequences.

[0190] Example 31: Specific detection and identification of Neisseria gonorrhoeae using tuf sequences.

[0191] Example 32: Sequencing of bacterial gyrA and parC gene fragments.

[0192] Example 33: Development of a PCR assay for the specific detection and identification of Staphylococcus aureus and its quinolone resistance genes gyrA and parC.

[0193] Example 34: Development of a PCR assay for the detection and identification of Klebsiella pneumoniae and its quinolone resistance genes gyrA and parC.

[0194] Example 35: Development of a PCR assay for the detection and identification of Streptococcus pneumoniae and its quinolone resistance genes gyrA and parC.

[0195] Example 36: Detection of extended-spectrum TEM-type β-lactamases in Escherichia coli.

[0196] Example 37: Detection of extended-spectrum SHV-type β-lactamases in Klebsiella pneumoniae.

[0197] Example 38: Development of a PCR assay for the detection and identification of Neisseria gonorrhoeae and its associated tetracycline resistance gene tetM.

[0198] Example 39: Development of a PCR assay for the detection and identification of Shigella sp. and their associated trimethoprim resistance gene dhfrIa.

[0199] Example 40: Development of a PCR assay for the detection and identification of Acinetobacter baumanii and its associated aminoglycoside resistance gene aph(3′)-VIa.

[0200] Example 41: Specific detection and identification of Bacteroides fragilis using atpD (V-type) sequences.

[0201] Example 42: Evidence for horizontal gene transfer in the evolution of the elongation factor Tu in Enterococci.

[0202] Example 43: Elongation factor Tu (tuf) and the F-ATPase beta-subunit (atpD) as phylogenetic tools for species of the family Enterobacteriaceae.

[0203] Example 44: Testing new pairs of PCR primers selected from two species-specific genomic DNA fragments which are objects of U.S. Pat. No. 6,001,564.

[0204] Example 45: Testing modified versions of PCR primers derived from the sequence of several primers which are objects of U.S. Pat. No. 6,001,564.

[0205] The various Annexes show the strategies used for the selection of a variety of DNA amplification primers, nucleic acid hybridization probes and molecular beacon internal probes:
[0206] (i) Annex I shows the amplification primers used for nucleic acid amplification from tuf sequences.
[0207] (ii) Annex II shows the amplification primers used for nucleic acid amplification from atpD sequences.
[0208] (iii) Annex III shows the internal hybridization probes for detection of tuf sequences.
[0209] (iv) Annex IV illustrates the strategy used for the selection of the amplification primers specific for atpD sequences of the F-type.
[0210] (v) Annex V illustrates the strategy used for the selection of the amplification primers specific for atpD sequences of the V-type.
[0211] (vi) Annex VI illustrates the strategy used for the selection of the amplification primers specific for the tuf sequences of organelle lineage (M, the letter M is used to indicate that in most cases, the organelle is the mitochondria).
[0212] (vii) Annex VII illustrates the strategy used for the selection of the amplification primers specific for the tuf sequences of eukaryotes (EF-1).
[0213] (viii) Annex VIII illustrates the strategy for the selection of Streptococcus agalactiae-specific amplification primers from tuf sequences.
[0214] (ix) Annex IX illustrates the strategy for the selection of Streptococcus agalactiae-specific hybridization probes from tuf sequences.
[0215] (x) Annex X illustrates the strategy for the selection of Streptococcus agalactiae-specific amplification primers from atpD sequences.
[0216] (xi) Annex XI illustrates the strategy for the selection from tuf sequences of Candida albicans/dubliniensis-specific amplification primers, Candida albicans-specific hybridization probe and Candida dubliniensis-specific hybridization probe.
[0217] (xii) Annex XII illustrates the strategy for the selection of Staphylococcus-specific amplification primers from tuf sequences.
[0218] (xiii) Annex XIII illustrates the strategy for the selection of the Staphylococcus-specific hybridization probe from tuf sequences.
[0219] (xiv) Annex XIV illustrates the strategy for the selection of Staphylococcus saprophyticus-specific and Staphylococcus haemolyticus-specific hybridization probes from tuf sequences.
[0220] (xv) Annex XV illustrates the strategy for the selection of Staphylococcus aureus-specific and Staphylococcus epidermidis-specific hybridization probes from tuf sequences.
[0221] (xvi) Annex XVI illustrates the strategy for the selection of the Staphylococcus hominis-specific hybridization probe from tuf sequences.
[0222] (xvii) Annex XVII illustrates the strategy for the selection of the Enterococcus-specific amplification primers from tuf sequences.
[0223] (xviii) Annex XVIII illustrates the strategy for the selection of the Enterococcus faecalis-specific hybridization probe, of the Enterococcus faecium-specific hybridization probe and of the Enterococcus casseliflavus-flavescens-gallinarum group-specific hybridization probe from tuf sequences.
[0224] (xix) Annex XIX illustrates the strategy for the selection of primers from tuf sequences for the identification of platelets contaminants.
[0225] (xx) Annex XX illustrates the strategy for the selection of the universal amplification primers from atpD sequences.
[0226] (xxi) Annex XXI shows the amplification primers used for nucleic acid amplification from recA sequences.
[0227] (xxii) Annex XXII shows the specific and ubiquitous primers for nucleic acid amplification from speA sequences.
[0228] (xxiii) Annex XXIII illustrates the first strategy for the selection of Streptococcus pyogenes-specific amplification primers from speA sequences.
[0229] (xxiv) Annex XXIV illustrates the second strategy for the selection of Streptococcus pyogenes-specific amplification primers from speA sequences.
[0230] (xxv) Annex XXV illustrates the strategy for the selection of Streptococcus pyogenes-specific amplification primers from tuf sequences.
[0231] (xxvi) Annex XXVI illustrates the strategy for the selection of stx₁-specific amplification primers and hybridization probe.
[0232] (xxvii) Annex XXVII illustrates the strategy for the selection of stx₂-specific amplification primers and hybridization probe.
[0233] (xxviii) Annex XXVIII illustrates the strategy for the selection of vanA-specific amplification primers from van sequences.
[0234] (xxix) Annex XXIX illustrates the strategy for the selection of vanB-specific amplification primers from van sequences.
[0235] (xxx) Annex XXX illustrates the strategy for the selection of vanC-specific amplification primers from vanC sequences.
[0236] (xxxi) Annex XXXI illustrates the strategy for the selection of Streptococcus pneumoniae-specific amplification primers and hybridization probes from pbp1a sequences.
[0237] (xxxii) Annex XXXII shows the specific and ubiquitous primers for nucleic acid amplification from toxin gene sequences.
[0238] (xxxiii) Annex XXXIII shows the molecular beacon internal hybridization probes for specific detection of toxin sequences.
[0239] (xxxiv) Annex XXXIV shows the specific and ubiquitous primers for nucleic acid amplification from van sequences.
[0240] (xxxv) Annex XXXV shows the internal hybridization probes for specific detection of van sequences.
[0241] (xxxvi) Annex XXXVI shows the specific and ubiquitous primers for nucleic acid amplification from pbp sequences.
[0242] (xxxvii) Annex XXXVII shows the internal hybridization probes for specific detection of pbp sequences.
[0243] (xxxviii) Annex XXXVIII illustrates the strategy for the selection of vanAB-specific amplification primers and vanA- and vanB-specific hybridization probes from van sequences.
[0244] (xxxix) Annex XXXIX shows the internal hybridization probe for specific detection of mecA.
[0245] (xl) Annex XL shows the specific and ubiquitous primers for nucleic acid amplification from hexA sequences.
[0246] (xli) Annex XLI shows the internal hybridization probe for specific detection of hexA.
[0247] (xlii) Annex XLII illustrates the strategy for the selection of Streptococcus pneumoniae species-specific amplification primers and hybridization probe from hexA sequences.
[0248] (xliii) Annex XLIII shows the specific and ubiquitous primers for nucleic acid amplification from pcp sequences.
[0249] (xliv) Annex XLIV shows specific and ubiquitous primers for nucleic acid amplification of S. saprophyticus sequences of unknown coding potential.
[0250] (xlv) Annex XLV shows the molecular beacon internal hybridization probes for specific detection of antimicrobial agents resistance gene sequences.
[0251] (xlvi) Annex XLVI shows the molecular beacon internal hybridization probe for specific detection of S. aureus gene sequences of unknown coding potential.
[0252] (xlvii) Annex XLVII shows the molecular beacon hybridization internal probe for specific detection of tuf sequences.
[0253] (xlviii) Annex XLVIII shows the molecular beacon internal hybridization probes for specific detection of ddI and mtl sequences.
[0254] (xlix) Annex XLIX shows the internal hybridization probe for specific detection of S. aureus sequences of unknown coding potential.
[0255] (l) Annex L shows the amplification primers used for nucleic acid amplification from antimicrobial agents resistance genes sequences.
[0256] (li) Annex LI shows the internal hybridization probes for specific detection of antimicrobial agents resistance genes sequences.
[0257] (lii) Annex LII shows the molecular beacon internal hybridization probes for specific detection of atpD sequences.
[0258] (liii) Annex LIII shows the internal hybridization probes for specific detection of atpD sequences.
[0259] (liv) Annex LIVI shows the internal hybridization probes for specific detection of ddI and mtl sequences.

[0260] As shown in these Annexes, the selected amplification primers may contain inosines and/or base ambiguities. Inosine is a nucleotide analog able to specifically bind to any of the four nucleotides A, C, G or T. Alternatively, degenerated oligonucleotides which consist of an oligonucleotide mix having two or more of the four nucleotides A, C, G or T at the site of mismatches were used. The inclusion of inosine and/or of degeneracies in the amplification primers allows mismatch tolerance thereby permitting the amplification of a wider array of target nucleotide sequences (Dieffenbach and Dveksler, 1995 PCR Primer: A Laboratory Manual, Cold Spring Harbor Laboratory Press, Plainview, N.Y.).

### EXAMPLES

### Example 1

### Sequencing of Bacterial atpD (F-Type and V-Type) Gene Fragments

[0261] As shown in Annex IV, the comparison of publicly available atpD (F-type) sequences from a variety of bacterial species revealed conserved regions allowing the design of PCR primers able to amplify atpD sequences (F-type) from a wide range of bacterial species. Using primers pairs SEQ ID NOs. 566 and 567, 566 and 814, 568 and 567, 570 and 567, 572 and 567, 569 and 567, 571 and 567, 700 and 567, it was possible to amplify and sequence atpD sequences SEQ ID NOs. 242-270, 272-398, 673-674, 737-767, 866-867, 942-955, 1245-1254, 1256-1265, 1527, 1576, 1577, 1600-1604, 1640-1646, 1649, 1652, 1655, 1657, 1659-1660, 1671, 1844-1845, and 1849-1865.

[0262] Similarly, Annex V shows the strategy to design the PCR primers able to amplify atpD sequences of the V-type from a wide range of archaeal and bacterial species. Using primers SEQ ID NOs. 681-683, it was possible to amplify and sequence atpD sequences SEQ ID NOs. 827-832, 929-931, 958 and 966. As the gene was difficult to amplify for several species, additional amplification primers were designed inside the original amplicon (SEQ ID NOs. 1203-1207) in order to obtain sequence information for these species. Other primers (SEQ ID NO. 1212, 1213, 2282-2285) were also designed to amplify regions of the atpD gene (V-type) in archaebacteria.

### Example 2

### Sequencing of Eukaryotic atpD (F-Type and V-Type) Gene Fragments

[0263] The comparison of publicly available atpD (F-type) sequences from a variety of fungal and parasitical species revealed conserved regions allowing the design of PCR primers able to amplify atpD sequences from a wide range of fungal and parasitical species. Using primers pairs SEQ ID NOs. 568 and 573, 574 and 573, 574 and 708, and 566 and 567, it was possible to amplify and sequence atpD sequences SEQ ID NOs. 458-497, 530-538, 663, 667, 676, 678-680, 768-778, 856-862, 889-896, 941, 1638-1639, 1647, 1650-1651, 1653-1654, 1656, 1658, 1684, 1846-1848, and 2189-2192.

[0264] In the same manner, the primers described in Annex V (SEQ ID NOs. 681-683) could amplify the atpD (V-type) gene from various fungal and parasitical species. This strategy allowed to obtain SEQ ID NOs. 834-839, 956-957, and 959-965.

### Example 3

### Sequencing of Eukaryotic tuf (EF-1) Gene Fragments

[0265] As shown in Annex VII, the comparison of publicly available tuf (EF-1) sequences from a variety of fungal and parasitical species revealed conserved regions allowing the design of PCR primers able to amplify tuf sequences from a wide range of fungal and parasitical species. Using primers pairs SEQ ID NOs. 558 and 559, 813 and 559, 558 and 815, 560 and 559, 653 and 559, 558 and 655, and 654 and 559, 1999 and 2000, 2001 and 2003, 2002 and 2003, it was possible to amplify and sequence tuf sequences SEQ ID NOs. 399-457, 509-529, 622-624, 677, 779-790, 840-842, 865, 897-903, 1266-1287, 1561-1571 and 1685.

### Example 4

### Sequencing of Eukaryotic tuf (Organelle Origin, M) Gene Fragments

[0266] As shown in Annex VI, the comparison of publicly available tuf (organelle origin, M) sequences from a variety of fungal and parasitical organelles revealed conserved regions allowing the design of PCR primers able to amplify tuf sequences of several organelles belonging to a wide range fungal and parasitical species. Using primers pairs SEQ ID NOs. 664 and 652, 664 and 561, 911 and 914, 912 and 914, 913 and 915, 916 and 561, 664 and 917, it was possible to amplify and sequence tuf sequences SEQ ID NOs. 498-508, 791-792, 843-855, 904-910, 1664, 1666-1667, 1669-1670, 1673-1683, 1686-1689, 1874-1876, 1879, 1956-1960, and 2193-2199.

### Example 5

### Specific Detection and Identification of Streptococcus agalactiae Using tuf Sequences

[0267] As shown in Annex VIII, the comparison of tuf sequences from a variety of bacterial species allowed the selection of PCR primers specific for S. agalactiae. The strategy used to design the PCR primers was based on the analysis of a multiple sequence alignment of various tuf sequences. The multiple sequence alignment includes the tuf sequences of four bacterial strains from the target species as well as tuf sequences from other species and bacterial genera, especially representatives of closely related species. A careful analysis of this alignment allowed the selection of oligonucleotide sequences which are conserved within the target species but which discriminate sequences from other species and genera, especially from the closely related species, thereby permitting the species-specific, ubiquitous and sensitive detection and identification of the target bacterial species.

[0268] The chosen primer pair, oligos SEQ ID NO. 549 and SEQ ID NO. 550, gives an amplification product of 252 bp. Standard PCR was carried out using 0.4 μM of each primer, 2.5 mM MgCl₂, BSA 0.05 mM, 1× Taq Buffer (Promega), dNTP 0.2 mM (Pharmacia), 0.5 U Taq DNA polymerase (Promega) coupled with TaqStart™ antibody (Clontech Laboratories Inc., Palo Alto), 1 μl of genomic DNA sample in a final volume of 20 μl using a PTC-200 thermocycler (MJ Research Inc.). The optimal cycling conditions for maximum sensitivity and specificity were 3 minutes at 95° C. for initial denaturation, then forty cycles of two steps consisting of 1 second at 95° C. and 30 seconds at 62° C., followed by terminal extension at 72° C. for 2 minutes. Detection of the PCR products was made by electrophoresis in agarose gels (2%) containing 0.25 μg/ml of ethidium bromide.

[0269] Specificity of the assay was tested by adding into the PCR reactions, 0.1 ng of genomic DNA from each of the bacterial species listed in Table 8. Efficient amplification was observed only for the 5 S. agalactiae strains listed. Of the other bacterial species, including 32 species representative of the vaginal flora and 27 other streptococcal species, only S. acidominimus yielded amplification. The signal with 0.1 ng of S. acidominimus genomic DNA was weak and the detection limit for this species was 10 pg (corresponding to more than 4000 genome copies) while the detection limit for S. agalactiae was 2.5 fg (corresponding to one genome copy) of genomic DNA.

[0270] To increase the specificity of the assay, internal probes were designed for FRET (Fluorescence Resonance Energy Transfer) detection using the LightCycler™ (Idaho Technology). As illustrated in Annex IX, a multiple sequence alignment of streptococcal tuf sequence fragments corresponding to the 252 by region amplified by primers SEQ ID NO. 549 and SEQ ID NO. 550, was used for the design of internal probes TSagHF436 (SEQ ID NO. 582) and TSagHF465 (SEQ ID NO. 583). The region of the amplicon selected for internal probes contained sequences unique and specific to S. agalactiae. SEQ ID NO. 583, the more specific probe, is labelled with fluorescein in 3′, while SEQ ID NO. 582, the less discriminant probe, is labelled with CY5 in 5′ and blocked in 3′ with a phosphate group. However, since the FRET signal is only emitted if both probes are adjacently hybridized on the same target amplicon, detection is highly specific.

[0271] Real-time detection of PCR products using the LightCycler™ was carried out using 0.4 μM of each primer (SEQ ID NO. 549-550), 0.2 μM of each probe (SEQ ID NO. 582-583), 2.5 mM MgCl₂, BSA 450 μg/ml, 1×PC2 Buffer (AB Peptides, St-Louis, dNTP 0.2 mM (Pharmacia), 0.5 U KlenTaq1™ DNA polymerase (AB Peptides) coupled with TaqStart™ antibody (Clontech Laboratories Inc., Palo Alto), 0.7 μl of genomic DNA sample in a final volume of 7 μl using a LightCycler thermocycler (Idaho Technology). The optimal cycling conditions for maximum sensitivity and specificity were 3 minutes at 94° C. for initial denaturation, then forty cycles of three steps consisting of 0 second (this setting meaning the LightCycler will reach the target temperature and stay at it for its minimal amount of time) at 94° C., 10 seconds at 64° C., 20 seconds at 72° C. Amplification was monitored during each annealing steps using the fluorescence ratio. The streptococcal species having close sequence homologies with the tuf sequence of S. agalactiae (S. acidominimus, S. anginosus, S. bovis, S. dysgalactiae, S. equi, S. ferus, S. gordonii, S. intermedius, S. parasanguis, S. parauberis, S. salivarius, S. sanguis, S. suis) as well as S. agalactiae were tested in the LightCycler with 0.07 ng of genomic DNA per reaction. Only S. agalactiae yielded an amplification signal, hence demonstrating that the assay is species-specific. With the LightCycler™ assay using the internal FRET probes, the detection limit for S. agalactiae was 1-2 genome copies of genomic DNA.

### Example 6

### Specific Detection and Identification of Streptococcus agalactiae Using atpD Sequences

[0272] As shown in Annex X, the comparison of atpD sequences from a variety of bacterial species allowed the selection of PCR primers specific for S. agalactiae. The primer design strategy is similar to the strategy described in the preceding Example except that atpD sequences were used in the alignment.

[0273] Four primers were selected, ASag42 (SEQ ID NO. 627), ASag52 (SEQ ID NO. 628), ASag206 (SEQ ID NO. 625) and ASag371 (SEQ ID NO. 626). The following combinations of these four primers give four amplicons; SEQ ID NO. 627+SEQ ID NO. 625=190 bp, SEQ ID NO. 628+SEQ ID NO. 625=180 bp, SEQ ID NO. 627+SEQ ID NO. 626=355 bp, and SEQ ID NO. 628+SEQ ID NO. 626=345 bp.

[0274] Standard PCR was carried out on PTC-200 thermocyclers (MJ Research Inc) using 0.4 μM of each primers pair, 2.5 mM MgCl₂, BSA 0.05 mM, 1× taq Buffer (Promega), dNTP 0.2 mM (Pharmacia), 0.5 U Taq DNA polymerase (Promega) coupled with TaqStart™ antibody (Clontech Laboratories Inc., Palo Alto), 1 μl of genomic DNA sample in a final volume of 20 μL. The optimal cycling conditions for maximum sensitivity and specificity were adjusted for each primer pair. Three minutes at 95° C. for initial denaturation, then forty cycles of two steps consisting of 1 second at 95° C. and 30 seconds at the optimal annealing temperature specified below were followed by terminal extension at 72° C. for 2 minutes. Detection of the PCR products was made by electrophoresis in agarose gels (2%) containing 0.25 μg/ml of ethidium bromide. Since atpD sequences are relatively more specific than tuf sequences, only the most closely related species namely, the streptococcal species listed in Table 9, were tested.

[0275] All four primer pairs only amplified the six S. agalactiae strains. With an annealing temperature of 63° C., the primer pair SEQ ID NO. 627+SEQ ID NO. 625 had a sensitivity of 1-5 fg (equivalent to 1-2 genome copies). At 55° C., the primer pair SEQ ID NO. 628+SEQ ID NO. 625 had a sensitivity of 2.5 fg (equivalent to 1 genome copy). At 60° C., the primer pair SEQ ID NO. 627+SEQ ID NO. 626 had a sensitivity of 10 fg (equivalent to 4 genome copies). At 58° C., the primer pair SEQ ID NO. 628+SEQ ID NO. 626 had a sensitivity of 2.5-5 fg (equivalent to 1-2 genome copies). This proves that all four primer pairs can detect S. agalactiae with high specificity and sensitivity. Together with Example 5, this example demonstrates that both tuf and atpD sequences are suitable and flexible targets for the identification of microorganisms at the species level. The fact that 4 different primer pairs based on atpD sequences led to efficient and specific amplification of S. agalactiae demonstrates that the challenge is to find target genes suitable for diagnostic purposes, rather than finding primer pairs from these target sequences.

### Example 7

### Development of a PCR Assay for Detection and Identification of Staphylococci at Genus and Species Levels

### Materials and Methods

[0276] Bacterial strains. The specificity of the PCR assay was verified by using a panel of ATCC (America Type Culture Collection) and DSMZ (Deutsche Sammlung von Mikroorganismen and Zellkulturen GmbH; German Collection of Microorganisms and Cell Cultures) reference strains consisting of 33 gram-negative and 47 gram-positive bacterial species (Table 12). In addition, 295 clinical isolates representing 11 different species of staphylococci from the microbiology laboratory of the Centre Hospitalier Universitaire de Québec, Pavillon Centre Hospitalier de l'Université Laval (CHUL) (Step-Foy, Québec, Canada) were also tested to further validate the Staphylococcus-specific PCR assay. These strains were all identified by using (i) conventional methods or (ii) the automated MicroScan Autoscan-4 system equipped with the Positive BP Combo Panel Type 6 (Dade Diagnostics, Mississauga, Ontario, Canada). Bacterial strains from frozen stocks kept at −80° C. in brain heart infusion (BHI) broth containing 10% glycerol were cultured on sheep blood agar or in BHI broth (Quelab Laboratories Inc, Montréal, Québec, Canada).

[0277] PCR primers and internal probes. Based on multiple sequence alignments, regions of the tuf gene unique to staphylococci were identified. Staphylococcus-specific PCR primers TStaG422 (SEQ ID NO. 553) and TStaG765 (SEQ ID NO. 575) were derived from these regions (Annex XII). These PCR primers are displaced by two nucleotide positions compared to original Staphylococcus-specific PCR primers described in our patent publication WO98/20157 (SEQ ID NOs. 17 and 20 in the said patent publication). These modifications were done to ensure specificity and ubiquity of the primer pair, in the light of new tuf sequence data revealed in the present patent application for several additional staphylococcal species and strains.

[0278] Similarly, sequence alignment analysis were performed to design genus and species-specific internal probes (see Annexes XIII to XVI). Two internal probes specific for Staphylococcus (SEQ ID NOs. 605-606), five specific for S. aureus (SEQ ID NOs. 584-588), five specific for S. epidermidis (SEQ ID NO. 589-593), two specific for S. haemolyticus (SEQ ID NOs. 594-595), three specific for S. hominis (SEQ ID NOs. 596-598), four specific for S. saprophyticus (SEQ ID NOs. 599-601 and 695), and two specific for coagulase-negative Staphylococcus species including S. epidermidis, S. hominis, S. saprophyticus, S. auricularis, S. capitis, S. haemolyticus, S. lugdunensis, S. simulans, S. cohnii and S. warneri (SEQ ID NOs. 1175-1176) were designed. The range of mismatches between the Staphylococcus-specific 371-bp amplicon and each of the 20-mer species-specific internal probes was from 1 to 5, in the middle of the probe when possible. No mismatches were present in the two Staphylococcus-specific probes for the 11 species analyzed: S. aureus, S. auricularis, S. capitis, S. cohnii, S. epidermidis, S. haemolyticus, S. hominis, S. lugdunensis, S. saprophyticus, S. simulans and S. warneri. In order to verify the intra-specific sequence conservation of the nucleotide sequence, sequences were obtained for the 371-bp amplicon from five unrelated ATCC and clinical strains for each of the species S. aureus, S. epidermidis, S. haemolyticus, S. hominis and S. saprophyticus. The Oligo™ (version 5.0) primer analysis software (National Biosciences, Plymouth, Minn.) was used to confirm the absence of self-complementary regions within and between the primers or probes. When required, the primers contained inosines or degenerated nucleotides at one or more variable positions. Oligonucleotide primers and probes were synthesized on a model 394 DNA synthesizer (Applied Biosystems, Mississauga, Ontario, Canada). Detection of the hybridization was performed with the DIG-labeled dUTP incorporated during amplification with the Staphylococcus-specific PCR assay, and the hybridization signal was detected with a luminometer (Dynex Technologies) as described above in the section on luminescent detection of amplification products. Annexes XIII to XVI illustrate the strategy for the selection of several internal probes.

[0279] PCR amplification. For all bacterial species, amplification was performed from purified genomic DNA or from a bacterial suspension whose turbidity was adjusted to that of a 0.5 McFarland standard, which corresponds to approximately 1.5×10⁸ bacteria per ml. One nanogram of genomic DNA or 1 □l of the standardized bacterial suspension was transferred directly to a 19 □l PCR mixture. Each PCR reaction contained 50 mM KCl, 10 mM Tris-HCl (pH 9.0), 0.1% Triton X-100, 2.5 mM MgCl₂, 0.2 □M (each) of the two Staphylococcus genus-specific primers (SEQ ID NOs. 553 and 575), 200 □M (each) of the four deoxynucleoside triphosphates (Pharmacia Biotech), 3.3 □g/□l bovine serum albumin (BSA) (Sigma-Aldrich Canada Ltd, Oakville, Ontario, Canada), and 0.5 U Taq polymerase (Promega) coupled with TaqStart™ Antibody (Clontech). The PCR amplification was performed as follows: 3 min. at 94° C. for initial denaturation, then forty cycles of two steps consisting of 1 second at 95° C. and 30 seconds at 55° C., plus a terminal extension at 72° C. for 2 minutes. Detection of the PCR products was made by electrophoresis in agarose gels (2%) containing 0.25 μg/ml of ethidium bromide. Visualization of the PCR products was made under UV at 254 nm.

[0280] For determination of the sensitivities of the PCR assays, two-fold dilutions of purified genomic DNA were used to determine the minimal number of genome copies which can be detected.

### Results

[0281] Amplifications with the Staphylococcus genus-specific PCR assay. The specificity of the assay was assessed by performing 30-cycle and 40-cycle PCR amplifications with the panel of gram-positive (47 species from 8 genera) and gram-negative (33 species from 22 genera) bacterial species listed in Table 12. The PCR assay was able to detect efficiently 27 of 27 staphylococcal species tested in both 30-cycle and 40-cycle regimens. For 30-cycle PCR, all bacterial species tested other than staphylococci were negative. For 40-cycle PCR, Enterococcus faecalis and Macrococcus caseolyticus were slightly positive for the Staphylococcus-specific PCR assay. The other species tested remained negative. Ubiquity tests performed on a collection of 295 clinical isolates provided by the microbiology laboratory of the Centre Hospitalier Universitaire de Québec, Pavillon Centre Hospitalier de l'Université Laval (CHUL), including Staphylococcus aureus (n=34), S. auricularis (n=2), S. capitis (n=19), S. cohnii (n=5), S. epidermidis (n=18), S. haemolyticus (n=21), S. hominis (n=73), S. lugdunensis (n=17), S. saprophyticus (n=6), S. simulans (n=3), S. warneri (n=32) and Staphylococcus sp. (n=65), showed a uniform amplification signal with the 30-cycle PCR assays and a perfect relation between the genotype and classical identification schemes.

[0282] The sensitivity of the Staphylococcus-specific assay with 30-cycle and 40-cycle PCR protocols was determined by using purified genomic DNA from the 11 staphylococcal species previously mentioned. For PCR with 30 cycles, a detection limit of 50 copies of genomic DNA was consistently obtained. In order to enhance the sensitivity of the assay, the number of cycles was increased. For 40-cycle PCR assays, the detection limit was lowered to a range of 5-10 genome copies, depending on the staphylococcal species tested.

[0283] Hybridization between the Staphylococcus-specific 371-bp amplicon and species-specific or genus-specific internal probes. Inter-species polymorphism was sufficient to generate species-specific internal probes for each of the principal species involved in human diseases (S. aureus, S. epidermidis, S. haemolyticus, S. hominis and S. saprophyticus). In order to verify the intra-species sequence conservation of the nucleotide sequence, sequence comparisons were performed on the 371-bp amplicon from five unrelated ATCC and clinical strains for each of the 5 principal staphylococcal species: S. aureus, S. epidermidis, S. haemolyticus, S. hominis and S. saprophyticus. Results showed a high level of conservation of nucleotide sequence between different unrelated strains from the same species. This sequence information allowed the development of staphylococcal species identification assays using species-specific internal probes hybridizing to the 371-bp amplicon. These assays are specific and ubiquitous for those five staphylococcal species. In addition to the species-specific internal probes, the genus-specific internals probes were able to recognize all or most Staphylococcus species tested.

### Example 8

### Differentiating Between the Two Closely Related Yeast Species Candida albicans and Candida dubliniensis

[0284] It is often useful for the clinician to be able to differentiate between two very closely related species of microorganisms. Candida albicans is the most important cause of invasive human mycose. In recent years, a very closely related species, Candida dubliniensis, was isolated in immunosuppressed patients. These two species are difficult to distinguish by classic biochemical methods. This example demonstrates the use of tuf sequences to differentiate Candida albicans and Candida dubliniensis. PCR primers SEQ ID NOs. 11-12, from previous patent publication WO98/20157, were selected for their ability to specifically amplify a tuf (elongation factor 1 alpha type) fragment from both species (see Annex XI for primer positions). Within this tuf fragment, a region differentiating C. albicans and C. dubliniensis by two nucleotides was selected and used to design two internal probes (see Annex XI for probe design, SEQ ID NOs. 577 and 578) specific for each species. Amplification of genomic DNA from C. albicans and C. dubliniensis was carried out using DIG-11-dUTP as described above in the section on chemiluminescent detection of amplification products. Internal probes SEQ ID NOs. 577 and 578 were immobilized on the bottom of individual microtiter plates and hybridization was carried out as described above in the above section on chemiluminescent detection of amplification products. Luminometer data showed that the amplicon from C. albicans hybridized only to probe SEQ ID NO. 577 while the amplicon from C. dubliniensis hybridized only to probe SEQ ID NO. 578, thereby demonstrating that each probe was species-specific.

### Example 9

### Specific Identification of Entamoeba histolytica

[0285] Upon analysis of tuf (elongation factor 1 alpha) sequence data, it was possible to find four regions where Entamoeba histolytica sequences remained conserved while other parasitical and eukaryotic species have diverged. Primers TEntG38 (SEQ ID NO. 703), TEntG442 (SEQ ID NO. 704), TEntG534 (SEQ ID NO. 705), and TEntG768 (SEQ ID NO. 706) were designed so that SEQ ID NO. 703 could be paired with the three other primers. On PTC-200 thermocyclers (MJ Research), the cycling conditions for initial sensitivity and specificity testing were 3 min. at 94° C. for initial denaturation, then forty cycles of two steps consisting of 1 second at 95° C. and 30 seconds at 55° C., followed by terminal extension at 72° C. for 2 minutes. Detection of the PCR products was made by electrophoresis in agarose gels (2%) containing 0.25 μg/ml of ethidium bromide. The three primer pairs could detect the equivalent of less than 200 E. histolytica genome copies. Specificity was tested using 0.5 ng of purified genomic DNA from a panel of microorganisms including Babesia bovis, Babesia microtti, Candida albicans, Crithidia fasciculata, Leishmania major, Leishmania hertigi and Neospora caninum. Only E. histolytica DNA could be amplified, thereby suggesting that the assay was species-specific.

### Example 10

### Sensitive Identification of Chlamydia trachomatis

[0286] Upon analysis of tuf sequence data, it was possible to find two regions where Chlamydia trachomatis sequences remained conserved while other species have diverged. Primers Ctr82 (SEQ ID NO. 554) and Ctr249 (SEQ ID NO. 555) were designed. With the PTC-200 thermocyclers (MJ Research), the optimal cycling conditions for maximum sensitivity and specificity were determined to be 3 min. at 94° C. for initial denaturation, then forty cycles of two steps consisting of 1 second at 95° C. and 30 seconds at 60° C., followed by terminal extension at 72° C. for 2 minutes. Detection of the PCR products was made by electrophoresis in agarose gels (2%) containing 0.25 μg/ml of ethidium bromide. The assay could detect the equivalent of 8 C. trachomatis genome copies. Specificity was tested with 0.1 ng of purified genomic DNA from a panel of microorganisms including 22 species commonly encountered in the vaginal flora (Bacillus subtilis, Bacteroides fragilis, Candida albicans, Clostridium difficile, Corynebacterium cervicis, Corynebacterium urealyticum, Enterococcus faecalis, Enterococcus faecium, Escherichia coli, Fusobacterium nucleatum, Gardnerella vaginalis, Haemophilus influenzae, Klebsiella oxytoca, Lactobacillus acidophilus, Peptococcus niger, Peptostreptococcus prevotii, Porphyromonas asaccharolytica, Prevotella melaminogenica, Propionibacterium acnes, Staphylococcus aureus, Streptococcus acidominimus, and Streptococcus agalactiae). Only C. trachomatis DNA could be amplified, thereby suggesting that the assay was species-specific.

### Example 11

### Genus-Specific Detection and Identification of Enterococci

[0287] Upon analysis of tuf sequence data and comparison with the repertory of tuf sequences, it was possible to find two regions where Enterococcus sequences remained conserved while other genera have diverged (Annex XVII). Primer pair Encg313dF and Encg599c (SEQ ID NOs. 1137 and 1136) was tested for its specificity by using purified genomic DNA from a panel of bacteria listed in Table 10. Using the PTC-200 thermocycler (MJ Research), the optimal cycling conditions for maximum sensitivity and specificity were determined to be 3 min. at 94° C. for initial denaturation, then forty cycles of two steps consisting of 1 second at 95° C. and 30 seconds at 55° C., followed by terminal extension at 72° C. for 2 minutes. Detection of the PCR products was made by electrophoresis in agarose gels (2%) containing 0.25 μg/ml of ethidium bromide. Visualization of the PCR products was made under UV at 254 nm. The 18 enterococcal species listed in Table 10 were all amplified efficiently. The only other species amplified were Abiotrophia adiacens, Gemella haemolysans and Gemella morbillorum, three gram-positive species. Sensitivity tested with several strains of E. casseliflavus, E. faecium, E. faecalis, E. flavescens and E. gallinarum and with one strain of each other Enterococcus species listed in Table 10 ranged from 1 to 10 copies of genomic DNA. The sequence variation within the 308-bp amplicon was sufficient so that internal probes could be used to speciate the amplicon and differentiate enterococci from Abiotrophia adiacens, Gemella haemolysans and Gemella morbillorum, thereby allowing to achieve excellent specificity. Species-specific internal probes were generated for each of the clinically important species, E. faecalis (SEQ ID NO. 1174), E. faecium (SEQ ID NO. 602), and the group including E. casseliflavus, E. flavescens and E. gallinarum (SEQ ID NO. 1122) (Annex XVIII). The species-specific internal probes were able to differentiate their respective Enterococcus species from all other Enterococcus species. These assays are sensitive, specific and ubiquitous for those five Enterococcus species.

### Example 12

### Identification of the Major Bacterial Platelets Contaminants Using Tuf Sequences with a Multiplex PCR Test

[0288] Blood platelets preparations need to be monitored for bacterial contaminations. The tuf sequences of 17 important bacterial contaminants of platelets were aligned. As shown in Annex XIX, analysis of these sequences allowed the design of PCR primers. Since in the case of contamination of platelet concentrates, detecting all species (not just the more frequently encountered ones) is desirable, perfect specificity of primers was not an issue in the design. However, sensitivity is important. That is why, to avoid having to put too much degeneracy, only the most frequent contaminants were included in primer design, knowing that the selected primers would anyway be able to amplify more species than the 17 used in the design because they target highly conserved regions of tuf sequences. Oligonucleotide sequences which are conserved in these 17 major bacterial contaminants of platelet concentrates were chosen (oligos Tplaq 769 and Tplaq 991, respectively SEQ ID NOs. 636 and 637) thereby permitting the detection of these bacterial species. However, sensitivity was slightly deficient with staphylococci. To ensure maximal sensitivity in the detection of all the more frequent bacterial contaminants, a multiplex assay also including oligonucleotide primers targeting the Staphylococcus genera (oligos Stag 422, SEQ ID NO. 553; and Stag 765, SEQ ID NO. 575) was developed. The bacterial species detected with the assay are listed in Table 14.

[0289] The primer pairs, oligos SEQ ID NO. 636 and SEQ ID NO. 637 that give an amplification product of 245 pb, and oligos SEQ ID NO. 553 and SEQ ID NO. 575 that give an amplification product of 368 pb, were used simultaneously in the multiplex PCR assay. Detection of these PCR products was made on the LightCycler thermocycler (Idaho Technology) using SYBR® Green I (Molecular Probe Inc.). SYBR® Green I is a fluorescent dye that binds specifically to double-stranded DNA.

[0290] Fluorogenic detection of PCR products with the LightCycler was carried out using 1.0 μM of both Tplaq primers (SEQ ID NOs. 636-637) and 0.4 μM of both TStaG primers (SEQ ID NOs. 553 and 575), 2.5 mM MgCl₂, BSA 7.5 μM, dNTP 0.2 mM (Pharmacia), 10 mM Tris-HCl (pH 8.3), 50 mM KCl, 0.5 U Taq DNA polymerase (Boerhinger Mannheim) coupled with TaqStart™ antibody (Clontech), and 0.07 ng of genomic DNA sample in a final volume of 7 μl. The optimal cycling conditions for maximum sensitivity and specificity were 1 minute at 94° C. for initial denaturation, then forty-five cycles of three steps consisting of 0 second at 95° C., 5 seconds at 60° C. and 9 seconds at 72° C. Amplification was monitored during each elongation cycle by measuring the level of SYBR® Green I. However, real analysis takes place after PCR. Melting curves are done for each sample and transformation of the melting peak allows determination of Tm. Thus primer-dimer and specific PCR product are discriminated. With this assay, all prominent bacterial contaminants of platelet concentrates listed in Annex XIX and Table 14 were detected. Sensitivity tests were performed on the 9 most frequent bacterial contaminants of platelets. The detection limit was less than 20 genome copies for E. cloacae, B. cereus, S. choleraesuis and S. marcescens; less than 15 genome copies for P. aeruginosa; and 2 to 3 copies were detected for S. aureus, S. epidermidis, E. coli and K. pneumoniae. Further refinements of assay conditions should increase sensitivity levels.

### Example 13

### The Resolving Power of the tuf and atpD Sequences Databases is Comparable to the Biochemical Methods for Bacterial Identification

[0291] The present gold standard for bacterial identification is mainly based on key morphological traits and batteries of biochemical tests. Here we demonstrate that the use of tuf and atpD sequences combined with simple phylogenetic analysis of databases formed by these sequences is comparable to the gold standard. In the process of acquiring data for the tuf sequences, we sequenced the tuf gene of a strain that was given to us labelled as Staphylococcus hominis ATCC 35982. That tuf sequence (SEQ ID NO. 192) was incorporated into the tuf sequences database and subjected to a basic phylogenic analysis using the Pileup command from version 10 of the GCG package (Genetics Computer Group). This analysis indicated that SEQ ID NO. 192 is not associated with other S. hominis strains but rather with the S. warneri strains. The ATCC 35982 strain was sent to the reference laboratory of the Laboratoire de santé publique du Québec (LSPQ). They used the classic identification scheme for staphylococci (Kloos and Schleifer, 1975., J. Clin. Microbiol. 1:82-88). Their results shown that although the colonial morphology could correspond to S. hominis, the more precise biochemical assays did not. These assays included discriminant mannitol, mannose and ribose acidification tests as well as rapid and dense growth in deep thioglycolate agar. The LSPQ report identified strain ATCC 35982 as S. warneri which confirms our database analysis. The same thing happened for S. warneri (SEQ ID NO. 187) which had initially been identified as S. haemolyticus by a routine clinical laboratory using a low resolving power automated system (MicroScan, AutoScan-4™). Again, the tuf and LSPQ analysis agreed on its identification as S. warneri. In numerous other instances, in the course of acquiring tuf and atpD sequence data from various species and genera, analysis of our tuf and/or atpD sequence databases permitted the exact identification of mislabeled or erroneously identified strains. These results clearly demonstrate the usefulness and the high resolving power of our sequence-based identification assays using the tuf and atpD sequences databases.

### Example 14

### Detection of Group B Streptococci from Clinical Specimens

### Introduction

[0292] Streptococcus agalactiae, the group B streptococcus (GBS), is responsible for a severe illness affecting neonate infants. The bacterium is passed from the healthy carrier mother to the baby during delivery. To prevent this infection, it is recommended to treat expectant mothers susceptible of carrying GBS in their vaginal/anal flora. Carrier status is often a transient condition and rigorous monitoring requires cultures and classic bacterial identification weeks before delivery. To improve the detection and identification of GBS we developed a rapid, specific and sensitive PCR test fast enough to be performed right at delivery.

### Materials and Methods

[0293] GBS clinical specimens. A total of 66 duplicate vaginal/anal swabs were collected from 41 consenting pregnant women admitted for delivery at the Centre Hospitalier Universitaire de Québec, Pavillon Saint-Francois d'Assise following the CDC recommendations. The samples were obtained either before or after rupture of membranes. The swab samples were tested at the Centre de Recherche en Infectiologie de l'Université Laval within 24 hours of collection. Upon receipt, one swab was cut and then the tip of the swab was added to GNS selective broth for identification of group B streptococci (GBS) by the standard culture methods recommended by the CDC. The other swab was processed following the instruction of the IDI DNA extraction kit (Infectio Diagnotics (IDI) Inc.) prior to PCR amplification.

[0294] Oligonucleotides. PCR primers, Tsag340 (SEQ ID NO. 549) and Tsag552 (SEQ ID NO. 550) complementary to the regions of the tuf gene unique for GBS were designed based upon a multiple sequence alignment using our repertory of tuf sequences. Oligo primer analysis software (version 5.0) (National Biosciences) was used to analyse primers annealing temperature, secondary structure potential as well as mispriming and dimerization potential. The primers were synthesized using a model 391 DNA synthesizer (Applied Biosystems).

[0295] A pair of fluorescently labeled adjacent hybridization probes Sag465-F (SEQ ID NO. 583) and Sag436-C (SEQ ID NO. 582) were synthesized and purified by Operon Technologies. They were designed to meet the recommendations of the manufacturer (Idaho Technology) and based upon multiple sequence alignment analysis using our repertory of tuf sequences to be specific and ubiquitous for GBS. These adjacent probes, which are separated by one nucleotide, allow fluorescence resonance energy transfer (FRET), generating an increased fluorescence signal when both hybridized simultaneously to their target sequences. The probe SEQ ID NO. 583 was labeled with FITC in 3 prime while SEQ ID NO. 582 was labeled with Cy5 in 5 prime. The Cy5-labeled probes contained a 3′-blocking phosphate group to prevent extension of the probes during the PCR reactions.

[0296] PCR amplification. Conventional amplifications were performed either from 2 μl of a purified genomic DNA preparation or cell lysates of vaginal/anal specimens. The 20 μl PCR mixture contained 0.4 μM of each GBS-specific primer (SEQ ID NOs. 549-550), 200 μM of each deoxyribonucleotide (Pharmacia Biotech), 10 mM Tris-HCl (pH 9.0), 50 mM KCl, 0.1% Triton X-100, 2.5 mM MgCl₂, 3.3 mg/ml bovine serum albumin (BSA) (Sigma), and 0.5 U of Taq polymerase (Promega) combined with the TaqStart™ antibody (Clontech). The TaqStart™ antibody, which is a neutralizing monoclonal antibody of Taq DNA polymerase, was added to all PCR reactions to enhance the efficiency of the amplification. The PCR mixtures were subjected to thermal cycling (3 min at 95° C. and then 40 cycles of 1 s at 95° C., and 30 s at 62° C. with a 2-min final extension at 72° C.) with a PTC-200 DNA Engine thermocycler (MJ research). The PCR-amplified reaction mixture was resolved by agarose gel electrophoresis.

[0297] The LightCycler™ PCR amplifications were performed with 1 μl of a purified genomic DNA preparation or cell lysates of vaginal/anal specimens. The 10 μl amplification mixture consisted of 0.4 μM each GBS-specific primer (SEQ ID NOs. 549-550), 200 μM each dNTP, 0.2 μM each fluorescently labeled probe (SEQ ID NOs. 582-583), 300 μg/ml BSA (Sigma), and 1 μl of 10×PC2 buffer (containing 50 mM Tris-HCl (pH 9.1), 16 mM ammonium sulfate, 3.5 mM Mg²⁺, and 150 μg/ml BSA) and 0.5 U KlenTaq1™ (AB Peptides) coupled with TaqStart™ antibody (Clontech). KlenTaq1™ is a highly active and more heat-stable DNA polymerase without 5′-exonuclease activity. This prevents hydrolysis of hybridized probes by the 5′ to 3′ exonuclease activity. A volume of 7 μl of the PCR mixture was transferred into a composite capillary tube (Idaho Technology). The tubes were then centrifuged to move the reaction mixture to the tips of the capillaries and then cleaned with optical-grade methanol. Subsequently the capillaries were loaded into the carousel of a LC32 LightCycler™ (Idaho Technology), an instrument that combines rapid-cycle PCR with fluorescence analysis for continuous monitoring during amplification. The PCR reaction mixtures were subjected to a denaturation step at 94° C. for 3 min followed by 45 cycles of 0 s at 94° C., 20 s at 64° C. and 10 s at 72° C. with a temperature transition rate of 20° C./s. Fluorescence signals were obtained at each cycle by sequentially positioning each capillary on the carousel at the focus of optical elements affiliated to the built-in fluorimeter for 100 milliseconds. Complete amplification and analysis required about 35 min.

[0298] Specificity and sensitivity tests. The specificity of the conventional and LightCycler™ PCR assays was verified by using purified genomic DNA (0.1 ng/reaction) from a battery of ATCC reference strains representing 35 clinically relevant gram-positive species (Abiotrophia defectiva ATCC 49176, Bifidobacterium breve ATCC 15700, Clostridium difficile ATCC 9689, Corynebacterium urealyticum ATCC 43042, Enterococcus casseliflavus ATCC 25788, Enterococcus durans ATCC 19432, Enterococcus faecalis ATCC 29212, Enterococcus faecium ATCC 19434, Enterococcus gallinarum ATCC 49573, Enterococcus raffinosus ATCC 49427, Lactobacillus reuteri ATCC 23273, Lactococcus lactis ATCC 19435, Listeria monocytogenes ATCC 15313, Peptococcus niger ATCC 27731, Peptostreptococcus anaerobius ATCC 27337, Peptostreptococcus prevotii ATCC 9321, Staphylococcus aureus ATCC 25923, Staphylococcus epidermidis ATCC 14990, Staphylococcus haemolyticus ATCC 29970, Staphylococcus saprophyticus ATCC 15305, Streptococcus agalactiae ATCC 27591, Streptococcus anginosus ATCC 33397, Streptococcus bovis ATCC 33317, Streptococcus constellatus ATCC 27823, Streptococcus dysgalactiae ATCC 43078, Streptococcus gordonii ATCC 10558, Streptococcus mitis ATCC 33399, Streptococcus mutans ATCC 25175, Streptococcus oralis ATCC 35037, Streptococcus parauberis ATCC 6631, Streptococcus pneumoniae ATCC 6303, Streptococcus pyogenes ATCC 19615, Streptococcus salivarius ATCC 7073, Streptococcus sanguinis ATCC 10556, Streptococcus uberis ATCC 19436). These microbial species included 15 species of streptococci and many members of the normal vaginal and anal floras. In addition, 40 GBS isolates of human origin, whose identification was confirmed by a latex agglutination test (Streptex, Murex), were also used to evaluate the ubiquity of the assay.

[0299] For determination of the sensitivities (i.e., the minimal number of genome copies that could be detected) for conventional and LightCycler™ PCR assays, serial 10-fold or 2-fold dilutions of purified genomic DNA from 5 GBS ATCC strains were used. Results

[0300] Evaluation of the GBS-specific conventional and LightCycler™ PCR assays. The specificity of the two assays demonstrated that only DNAs from GBS strains could be amplified. Both PCR assays did not amplify DNAs from any other bacterial species tested including 14 streptococcal species other than GBS as well as phylogenetically related species belonging to the genera Enterococcus, Peptostreptococcus and Lactococcus. Important members of the vaginal or anal flora, including coagulase-negative staphylococci, Lactobacillus sp., and Bacteriodes sp. were also negative with the GBS-specific PCR assay. The LightCycler™ PCR assays detected only GBS DNA by producing an increased fluorescence signal which was interpreted as a positive PCR result. Both PCR methods were able to amplify all of 40 GBS clinical isolates, showing a perfect correlation with the phenotypic identification methods.

[0301] The sensitivity of the assay was determined by using purified genomic DNA from the 5 ATCC strains of GBS. The detection limit for all of these 5 strains was one genome copy of GBS. The detection limit of the assay with the LightCycler™ was 3.5 fg of genomic DNA (corresponding to 1-2 genome copies of GBS). These results confirmed the high sensitivity of our GBS-specific PCR assay.

[0302] Direct Detection of GBS from vaginal/anal specimens. Among 66 vaginal/anal specimens tested, 11 were positive for GBS by both culture and PCR. There was one sample positive by culture only. The sensitivity of both PCR methods with vaginal/anal specimens for identifying colonization status in pregnant women at delivery was 91.7% when compared to culture results. The specificity and positive predictive values were both 100% and the negative predictive value was 97.8%. The time for obtaining results was approximately 45 min for LightCycler™ PCR, approximately 100 min for conventional PCR and 48 hours for culture.

### Conclusion

[0303] We have developed two PCR assays (conventional and LightCycler™) for the detection of GBS, which are specific (i.e., no amplification of DNA from a variety of bacterial species other than GBS) and sensitive (i.e., able to detect around 1 genome copy for several reference ATCC strains of GBS). Both PCR assays are able to detect GBS directly from vaginal/anal specimens in a very short turnaround time. Using the real-time PCR assay on LightCycler™, we can detect GBS carriage in pregnant women at delivery within 45 minutes.

### Example 15

### Simultaneous Detection and Identification of Streptococcus pyogenes and its Pyrogenic Exotoxin A

[0304] The rapid detection of Streptococcus pyogenes and of its pyrogenic exotoxin A is of clinical importance. We developed a multiplex assay which permits the detection of strains of S. pyogenes carrying the pyrogenic toxin A gene, which is associated with scarlet fever and other pathologies. In order to specifically detect S. pyogenes, nucleotide sequences of the pyrrolidone carboxylyl peptidase (pcp) gene were aligned to design PCR primers Spy291 (SEQ ID NO. 1211) and Spy473 (SEQ ID NO. 1210). Next, we designed primers for the specific detection of the pyrogenic exotoxin A. Nucleotide sequences of the speA gene, carried on the bacteriophage T12, were aligned as shown in Annex XXIII to design PCR primers Spytx814 (SEQ ID NO. 994) and Spytx 927 (SEQ ID NO. 995).

[0305] The primer pairs: oligos SEQ ID NOs. 1210-1211, yielding an amplification product of 207 bp, and oligos SEQ ID NOs. 994-995, yielding an amplification product of 135 bp, were used in a multiplex PCR assay.

[0306] PCR amplification was carried out using 0.4 μM of both pairs of primers, 2.5 mM MgCl₂, BSA 0.05 μM, dNTP 0.2 μM (Pharmacia), 10 mM Tris-HCl (pH 9.0), 0.1% Triton X-100, 2.5 mM MgCl₂, 0.5 U Taq DNA polymerase (Promega) coupled with TaqStart™ antibody (Clontech Laboratories Inc.), and 1 μl of genomic DNA sample in a final volume of 20 PCR amplification was performed using a PTC-200 thermal cycler (MJ Research). The optimal cycling conditions for maximum specificity and sensitivity were 3 minutes at 94° C. for initial denaturation, then forty cycles of two steps consisting of 1 second at 95° C. and 30 seconds at 63° C., followed by a final step of 2 minutes at 72° C. Detection of the PCR products was made by electrophoresis in agarose gels (2%) containing 0.25 μg/ml of ethidium bromide. Visualization of the PCR products was made under UV at 254 nm.

[0307] The detection limit was less than 5 genome copies for both S. pyogenes and its pyrogenic exotoxin A. The assay was specific for pyrogenic exotoxin A-producing S. pyogenes: strains of the 27 other species of Streptococcus tested, as well as 20 strains of various gram-positive and gram-negative bacterial species were all negative.

[0308] A similar approach was used to design an alternative set of speA-specific primers (SEQ ID NOs. 996 to 998, see Annex XXIV). In addition, another set of primers based on the tuf gene (SEQ ID NOs. 999 to 1001, see Annex XXV) could be used to specifically detect Streptococcus pyogenes.

### Example 16

### Real-Time Detection and Identification of Shiga Toxin-Producing Bacteria

[0309] Shiga toxin-producing Escherichia coli and Shigella dysenteriae cause bloody diarrhea. Currently, identification relies mainly on the phenotypic identification of S. dysenteriae and E. coli serotype O157:H7. However, other serotypes of E. coli are increasingly found to be producers of type 1 and/or type 2 Shiga toxins. Two pairs of PCR primers targeting highly conserved regions present in each of the Shiga toxin genes stx₁ and stx₂ were designed to amplify all variants of those genes (see Annexes XXVI and XXVII). The first primer pair, oligonucleotides 1SLT224 (SEQ ID NO. 1081) and 1SLT385 (SEQ ID NO. 1080), yields an amplification product of 186 by from the six, gene. For this amplicon, the 1SLTB1-Fam (SEQ ID NO. 1084) molecular beacon was designed for the specific detection of six, using the fluorescent label 6-carboxy-fluorescein. The 1 SltS1-FAM (SEQ ID NO. 2012) molecular scorpion was also designed as an alternate way for the specific detection of stx₁. A second pair of PCR primers, oligonucleotides 2SLT537 (SEQ ID NO. 1078) and 2SLT678b (SEQ ID NO. 1079), yields an amplification product of 160 by from the stx₂ gene. Molecular beacon 2SLTB1-Tet (SEQ ID NO. 1085) was designed for the specific detection of stx₂ using the fluorescent label 5-tetrachloro-fluorescein. Both primer pairs were combined in a multiplex PCR assay.

[0310] PCR amplification was carried out using 0.8 μM of primer pair SEQ ID NOs. 1080-1081, 0.5 μM of primer pair SEQ ID NOs. 1078-1079, 0.3 μM of each molecular beacon, 8 mM MgCl₂, 490 μg/mL BSA, 0.2 mM dNTPs (Pharmacia), 50 mM Tris-HCl, 16 mM NH₄SO₄, 1× TaqMaster (Eppendorf), 2.5 U KlenTaq1 DNA polymerase (AB Peptides) coupled with TaqStart™ antibody (Clontech Laboratories Inc.), and 1 μl of genomic DNA sample in a final volume of 25 PCR amplification was performed using a SmartCycler thermal cycler (Cepheid). The optimal cycling conditions for maximum sensitivity and specificity were 60 seconds at 95° C. for initial denaturation, then 45 cycles of three steps consisting of 10 seconds at 95° C., 15 seconds at 56° C. and 5 seconds at 72° C. Detection of the PCR products was made in real-time by measuring the fluorescent signal emitted by the molecular beacon when it hybridizes to its target at the end of the annealing step at 56° C.

[0311] The detection limit was the equivalent of less than 5 genome copies. The assay was specific for the detection of both toxins, as demonstrated by the perfect correlation between PCR results and the phenotypic characterization performed using antibodies specific for each Shiga toxin type. The assay was successfully performed on several Shiga toxin-producing strains isolated from various geographic areas of the world, including 10 O157:H7 E. coli, 5 non-O157:H7 E. coli and 4 S. dysenteriae.

### Example 17

### Development of a PCR Assay for the Detection and Identification of Staphylococci at Genus and Species Levels and its Associated mecA Gene

[0312] The Staphylococcus-specific PCR primers described in Example 7 (SEQ ID NOs. 553 and 575) were used in multiplex with the mecA-specific PCR primers and the S. aureus-specific primers described in our assigned U.S. Pat. No. 5,994,066 (SEQ ID NOs. 261 and 262 for mecA and SEQ ID NOs. 152 and 153 for S. aureus in the said patent). Sequence alignment analysis of 10 publicly available mecA gene sequences allowed to design an internal probe specific to mecA (SEQ ID NO. 1177). An internal probe was also designed for the S. aureus-specific amplicon (SEQ ID NO 1234). PCR amplification and agarose gel electrophoresis of the amplified products were performed as described in Example 7, with the exception that 0.4 μM (each) of the two Staphylococcus-specific primers (SEQ ID NOs. 553 and 575) and 0.4 μM (each) of the mecA-specific primers and 0.4 μM (each) of the S. aureus-specific primers were used in the PCR mixture. The specificity of the multiplex assay with 40-cycle PCR protocols was verified by using purified genomic DNA from five methicillin-resistant and fifteen methicillin-sensitive staphylococcal strains. The sensitivity of the multiplex assay with 40-cycle PCR protocols was determined by using purified genomic DNA from twenty-three methicillin-resistant and twenty-eight methicillin-sensitive staphylococcal strains. The detection limit was 2 to 10 genome copies of genomic DNA, depending on the staphylococcal species tested. Furthermore, the mecA-specific internal probe, the S. aureus-specific internal probe and the coagulase-negative staphylococci-specific internal probe (described in Example 7) were able to recognize twenty-three methicillin-resistant staphylococcal strains and twenty-eight methicillin-sensitive staphylococcal strains with high sensitivity and specificity.

[0313] The format of the assay is not limited to the one described above. A person skilled in the art could adapt the assay for different formats such as PCR with real-time detection using molecular beacon probes. Molecular beacon probes designed to be used in this assay include, but are not limited to, SEQ ID NO. 1232 for detection of the S. aureus-specific amplicon, SEQ ID NO. 1233 for detection of coagulase-negative staphylococci and SEQ ID NO. 1231 for detection of mecA.

[0314] Alternatively, a multiplex PCR assay containing the Staphylococcus-specific PCR primers described in Example 7 (SEQ ID NOs. 553 and 575) and the mecA-specific PCR primers described in our assigned U.S. Pat. No. 5,994,066 (SEQ ID NOs. 261 and 262 in the said patent) were developed. PCR amplification and agarose gel electrophoresis of the amplified products were performed as described in Example 7, with the exception that 0.4 μM (each) of the Staphylococcus-specific primers (SEQ ID NOs. 553 and 575) and 0.4 μM (each) of the mecA-specific primers described in our assigned U.S. Pat. No. 5,994,066 (SEQ ID NOs. 261 and 262 in the said patent) were used in the PCR mixture. The sensitivity of the multiplex assay with 40-cycle PCR protocols was determined by using purified genomic DNA from two methicillin-resistant and five methicillin-sensitive staphylococcal strains. The detection limit was 2 to 5 copies of genomic DNA, depending on the staphylococcal species tested. The specificity of the multiplex PCR assay coupled with capture-probe hybridization was tested with two strains of methicillin-resistant S. aureus, two strains of methicillin-sensitive S. aureus and seven strains of methicillin-sensitive coagulase-negative staphylococci. The mecA-specific internal probe (SEQ ID NO. 1177) and the S. aureus-specific internal probe (SEQ ID NO. 587) described in Example 7 were able to recognize all the strains with high specificity showing a perfect correlation with susceptibility to methicillin. The sensitivity of the PCR assay coupled with capture-probe hybridization was tested with one strain of methicillin-resistant S. aureus. The detection limit was around 10 copies of genomic DNA.

### Example 18

### Sequencing of pbp1a, pbp2b and pbp2x Genes of Streptococcus pneumoniae

[0315] Penicillin resistance in Streptococcus pneumoniae involves the sequential alteration of up to five penicillin-binding proteins (PBPs) 1A, 1B, 2A, 2X and 2B in such a way that their affinity is greatly reduce toward the antibiotic molecule. The altered PBP genes have arisen as the result of interspecies recombination events from related streptococcal species. Among the PBPs usually found in S. pneumoniae, PBPs 1A, 2B, and 2X play the most important role in the development of penicillin resistance. Alterations in PBP 2B and 2X mediate low-level resistance to penicillin while additional alterations in PBP 1A plays a significant role in full penicillin resistance.

[0316] In order to generate a database for pbp sequences that can be used for design of primers and/or probes for the specific and ubiquitous detection of β-lactam resistance in S. pneumoniae, pbp1a, pbp2b and pbp2x DNA fragments sequenced by us or selected from public databases (GenBank and EMBL) from a variety of S. pneumoniae strains were used to design oligonucleotide primers. This database is essential for the design of specific and ubiquitous primers and/or probes for detection of β-lactam resistance in S. pneumoniae since the altered PBP 1A, PBP 2B and PBP 2X of β-lactam resistant S. pneumoniae are encoded by mosaic genes with numerous sequence variations among resistant isolates. The PCR primers were located in conserved regions of pbp genes and were able to amplify pbp1a, pbp2b, and pbp2x sequences of several strains of S. pneumoniae having various levels of resistance to penicillin and third-generation cephalosporins. Using primer pairs SEQ ID NOs. 1125 and 1126, SEQ ID NOs. 1142 and 1143, SEQ ID NOs. 1146 and 1147, it was possible to amplify and determine pbp1a sequences SEQ ID NOs. 1004-1018, 1648, 2056-2060 and 2062-2064, pbp2b sequences SEQ ID NOs. 1019-1033, and pbp2x sequences SEQ ID NOs. 1034-1048. Six other PCR primers (SEQ ID NOs. 1127-1128, 1144-1145, 1148-1149) were also designed and used to complete the sequencing of pbp1a, pbp2b and pbp2x amplification products. The described primers (SEQ ID NOs. 1125 and 1126, SEQ ID NOs. 1142 and 1143, SEQ ID NOs. 1146 and 1147, SEQ ID NOs. 1127-1128, 1144-1145, 1148-1149) represent a powerful tool for generating new pbp sequences for design of primers and/or probes for detection of β-lactam resistance in S. pneumoniae.

### Example 19

### Sequencing of hexA Genes of Streptococcus Species

[0317] The hexA sequence of S. pneumoniae described in our assigned U.S. Pat. No. 5,994,066 (SEQ ID NO. 31 in the said patent, SEQ ID NO. 1183 in the present application) allowed the design of a PCR primer (SEQ ID NO. 1182) which was used with primer Spn1401 described in our assigned U.S. Pat. No. 5,994,066 (SEQ ID NO. 156 in the said patent, SEQ ID NO. 1179 in the present application) to generate a database for hexA sequences that can be used to design primers and/or probes for the specific identification and detection of S. pneumoniae (Annex XLII). Using primers SEQ ID NO. 1179 and SEQ ID NO. 1182 (Annex XLII), it was possible to amplify and determine the hexA sequence from S. pneumoniae (4 strains) (SEQ ID NOs. 1184-1187), S. mitis (three strains) (SEQ ID NOs. 1189-1191) and S. oralis (SEQ ID NO. 1188).

### Example 20

### Development of Multiplex PCR Assays Coupled with Capture Probe Hybridization for the Detection and Identification of Streptococcus pneumoniae and its Penicillin Resistance Genes

[0318] Two different assays were developed to identify S. pneumoniae and its susceptibility to penicillin.

### Assay I:

[0319] Bacterial strains. The specificity of the multiplex PCR assay was verified by using a panel of ATCC (American Type Culture Collection) reference strains consisting of 33 gram-negative and 67 gram-positive bacterial species (Table 13). In addition, a total of 98 strains of S. pneumoniae, 16 strains of S. mitis and 3 strains of S. oralis from the American Type Culture Collection, the microbiology laboratory of the Centre Hospitalier Universitaire de Québec, Pavillon Centre Hospitalier de l'Université Laval (CHUL), (Step-Foy, Québec, Canada), the Laboratoire de santé publique du Québec, (Sainte-Anne-de-Bellevue, Québec, Canada), the Sunnybrook and Women's College Health Sciences Centre (Toronto, Canada), the Infectious Diseases Section, Department of Veterans Affairs Medical Center, (Houston, USA) were also tested to further validate the Streptococcus pneumoniae-specific PCR assay. The penicillin MICs (minimal inhibitory concentrations) were measured by the broth dilution method according to the recommended protocol of NCCLS.

[0320] PCR primers and internal probes. The analysis of hexA sequences from a variety of streptococcal species from the publicly available hexA sequence and from the database described in Example 19 (SEQ ID NOs. 1184-1191) allowed the selection of a PCR primer specific to S. pneumoniae, SEQ ID NO. 1181. This primer was used with the S. pneumoniae-specific primer SEQ ID NO. 1179 to generate an amplification product of 241 by (Annex XLII). The PCR primer SEQ ID NO. 1181 is located 127 nucleotides downstream on the hexA sequence compared to the original S. pneumoniae-specific PCR primer Spn1515 described in our assigned U.S. Pat. No. 5,994,066 (SEQ ID NO. 157 in the said patent). These modifications were done to ensure the design of the S. pneumoniae-specific internal probe according to the new hexA sequences of several streptococcal species from the database described in Example 19 (SEQ ID NOs. 1184-1191).

[0321] The analysis of pbp1a sequences from S. pneumoniae strains with various levels of penicillin resistance from public databases and from the database described in Example 18 allowed the identification of amino acid substitutions Ile-459 to Met and Ser-462 to Ala that occur in isolates with high-level penicillin resistance (MICs≧1 μg/ml), and amino acid substitutions Ser-575 to Thr, Gln-576 to Gly and Phe-577 to Tyr that are common to all penicillin-resistant isolates with MICs≧0.25 μg/ml. As shown in Annex XXXI, PCR primer pair SEQ ID NOs. 1130 and 1131 were designed to detect high-level penicillin resistance (MICs≧1 μg/ml), whereas PCR primer pair SEQ ID NOs. 1129 and 1131 were designed to detect intermediate- and high-level penicillin resistance (MICs≧0.25 μg/ml).

[0322] The analysis of hexA sequences from the publicly available hexA sequence and from the database described in Example 19 allowed the design of an internal probe specific to S. pneumoniae (SEQ ID NO. 1180) (Annex XLII). The range of mismatches between the S. pneumoniae-specific 241-bp amplicon was from 2 to 5, in the middle of the 19-bp probe. The analysis of pbp1a sequences from public databases and from the database described in Example 18 allowed the design of five internal probes containing all possible mutations to detect the high-level penicillin resistance 383-bp amplicon (SEQ ID NOs. 1197, 1217-1220). Alternatively, two other internal probes (SEQ ID NOs. 2024-2025) can also be used to detect the high-level penicillin resistance 383-bp amplicon. Five internal probes containing all possible mutations to detect the 157-bp amplicon which includes intermediate- and high-level penicillin resistance were also designed (SEQ ID NOs. 1094, 1192-1193, 1214 and 1216). Design and synthesis of primers and probes, and detection of the probe hybridization were performed as described in Example 7. Annex XXXI illustrates one of the internal probe for detection of the high-level penicillin resistance 383-bp amplicon (SEQ ID NO. 1197) and one of the internal probe for detection of the intermediate- and high-level penicillin resistance 157-bp amplicon (SEQ ID NO. 1193).

[0323] PCR amplification. For all bacterial species, amplification was performed from purified genomic DNA using a PTC-200 thermocycler (MJ Research). 1 μl of genomic DNA at 0.1 ng/μl, or 1 μl of a bacterial lysate, was transferred to a 19 μl PCR mixture. Each PCR reaction contained 50 mM KCl, 10 mM Tris-HCl (H 9.0), 0.1% Triton X-100, 2.5 mM MgCl₂, 0.1 μM (each) of the S. pneumoniae-specific primers SEQ ID NO. 1179 and SEQ ID NO. 1181, 0.2 μM of primer SEQ ID NO. 1129, 0.7 μM of primer SEQ ID NO. 1131, and 0.6 μM of primer SEQ ID NO. 1130, 0.05 mM bovine serum albumin (BSA), and 0.5 U Taq polymerase (Promega) coupled with TaqStart™ antibody. In order to generate Digoxigenin (DIG)-labeled amplicons for capture probe hybridization, 0.1×PCR DIG labeling four deoxynucleoside triphosphates mix (Boehringer Mannheim GmbH) was used for amplification.

[0324] For determination of the sensitivity of the PCR assays, 10-fold dilutions of purified genomic DNA were used to determine the minimal number of genome copies which can be detected.

[0325] Capture probe hybridization. The DIG-labeled amplicons were hybridized to the capture probes bound to 96-well plates. The plates were incubated with anti-DIG-alkaline phosphatase and the chemiluminescence was measured by using a luminometer (MLX, Dynex Technologies Inc.) after incubation with CSPD and recorded as Relative Light Unit (RLU). The RLU ratio of tested sample with and without captures probes was then calculated. A ratio 2.0 was defined as a positive hybridization signal. All reactions were performed in duplicate.

### Results

[0326] Amplifications with the multiplex PCR assay. The specificity of the assay was assessed by performing 40-cycle PCR amplifications with the panel of gram-positive (67 species from 12 genera) and gram-negative (33 species from 17 genera) bacterial species listed in Table 13. All bacterial species tested other than S. pneumoniae were negative except S. mitis and S. oralis. Ubiquity tests were performed using a collection of 98 S. pneumoniae strains including high-level penicillin resistance (n=53), intermediate resistance (n=12) and sensitive (n=33) strains. There was a perfect correlation between PCR and standard susceptibility testing for 33 penicillin-sensitive isolates. Among 12 S. pneumoniae isolates with intermediate penicillin resistance based on susceptibility testing, 11 had intermediate resistance based on PCR, but one S. pneumoniae isolate with penicillin MIC of 0.25 μg/ml showed a high-level penicillin resistance based on genotyping. Among 53 isolates with high-level penicillin resistance based on susceptibility testing, 51 had high-level penicillin resistance based on PCR but two isolates with penicillin MIC>1 μg/ml showed an intermediate penicillin resistance based on genotyping. In general, there was a good correlation between the genotype and classical culture method for bacterial identification and susceptibility testing.

[0327] The sensitivity of the S. pneumoniae-specific assay with 40-cycle PCR protocols was determined by using purified genomic DNA from 9 isolates of S. pneumoniae. The detection limit was around 10 copies of genomic DNA for all of them.

[0328] Post-PCR hybridization with internal probes. The specificity of the multiplex PCR assay coupled with capture-probe hybridization was tested with 98 strains of S. pneumoniae, 16 strains of S. mitis and 3 strains of S. oralis. The internal probe specific to S. pneumoniae (SEQ ID NO. 1180) detected all 98 S. pneumoniae strains but did not hybridize to the S. mitis and S. oralis amplicons. The five internal probes specific to the high-level resistance amplicon (SEQ ID NOs. 1197, 1217-1220) detected all amplification patterns corresponding to high-level resistance. The two S. pneumoniae strains with penicillin MIC>1 μg/ml that showed an intermediate penicillin resistance based on PCR amplification were also intermediate resistance based on probe hybridization. Similarly, among 12 strains with intermediate-penicillin resistance based on susceptibility testing, 11 showed intermediate-penicillin resistance based on hybridization with the five internal probes specific to the intermediate and high-level resistance amplicon (SEQ ID NOs. 1094, 1192-1193, 1214 and 1216). The strain described above having a penicillin MIC of 0.25 μg/ml which was high-level penicillin resistance based on PCR amplification was also high-level resistance based on probe hybridization. In summary, the combination of the multiplex PCR and hybridization assays results in a highly specific test for the detection of penicillin-resistant Streptococcus pneumoniae.

### Assay II:

[0329] Bacterial strains. The specificity of the multiplex PCR assay was verified by using the same strains as those used for the development of Assay I. The penicillin MICs (minimal inhibitory concentrations) were measured by the broth dilution method according to the recommended protocol of NCCLS.

[0330] PCR primers and internal probes. The analysis of pbp1a sequences from S. pneumoniae strains with various levels of penicillin resistance from public databases and from the database described in Example 18 allowed the design of two primers located in the constant region of pbp1a. PCR primer pair (SEQ ID NOs. 2015 and 2016) was designed to amplify a 888-bp variable region of pbp1a from all S. pneumoniae strains. A series of internal probes were designed for identification of the pbp1a mutations associated with penicillin resistance in S. pneumoniae. For detection of high-level penicillin resistance (MICs≧1 μg/ml), three internal probes were designed (SEQ ID NOs. 2017-2019). Alternatively, ten other internal probes were designed that can also be used for detection of high-level resistance within the 888-bp pbp1a amplicon: (1) three internal probes for identification of the amino acid substitutions Thr-371 to Ser or Ala within the motif S370TMK (SEQ ID NOs. 2031-2033); (2) two internal probes for detection of the amino acid substitutions Ile-459 to Met and Ser-462 to Ala near the motif S428RN (SEQ ID NOs. 1135 and 2026); (3) two internal probes for identification of the amino acid substitutions Asn-443 to Asp (SEQ ID NOs. 1134 and 2027); and (4) three internal probes for detection of all sequence variations within another region (SEQ ID NOs. 2028-2030). For detection of high-level and intermediate penicillin resistance (MICs 0.25 μg/ml), four internal probes were designed (SEQ ID NOs. 2020-2023). Alternatively, six other internal probes were designed for detection of the four consecutive amino acid substitutions T574SQF to A574TGY near the motif K557TG (SEQ ID NOs. 2034-2039) that can also be used for detection of intermediate- and high-level resistance within the 888-bp pbp1a amplicon.

[0331] PCR amplification. For all bacterial species, amplification was performed from purified genomic DNA using a PTC-200 thermocycler (MJ Research). 1 μl of genomic DNA at 0.1 ng/μl, or 1 μl of a bacterial lysate, was transferred to a 19 μl PCR mixture. Each PCR reaction contained 50 mM KCl, 10 mM Tris-HCl (pH 9.0), 0.1% Triton X-100, 2.5 mM MgCl₂, 0.08 μM (each) of the S. pneumoniae-specific primers SEQ ID NO. 1179 and SEQ ID NO. 1181, 0.4 μM of the pbp1a-specific primer SEQ ID NO. 2015, 1.2 μM of pbp1a-specific primer SEQ ID NO. 2016, 0.05 mM bovine serum albumin (BSA), and 0.5 U Taq polymerase (Promega) coupled with TaqStart™ antibody. In order to generate Digoxigenin (DIG)-labeled amplicons for capture probe hybridization, 0.1×PCR DIG labeling four deoxynucleoside triphosphates mix (Boehringer Mannheim GmbH) was used for amplification.

[0332] For determination of the sensitivities of the PCR assays, 10-fold dilutions of purified genomic DNA were used to determine the minimal number of genome copies which can be detected.

[0333] Capture probe hybridization. The DIG-labeled amplicons were hybridized to the capture probes bound to 96-well plates as described for Assay I.

### Results

[0334] Amplifications with the multiplex PCR assay. The specificity of the assay was assessed by performing 40-cycle PCR amplifications with the panel of gram-positive (67 species from 12 genera) and gram-negative (33 species from 17 genera) bacterial species listed in Table 13. All bacterial species tested other than S. pneumoniae were negative except S. mitis and S. oralis. Ubiquity tests were performed using a collection of 98 S. pneumoniae strains including high-level penicillin resistance (n=53), intermediate resistance (n=12) and sensitive (n=33) strains. All the above S. pneumoniae strains produced the 888-bp amplicon corresponding to pbp1a and the 241-bp fragment corresponding to hexA.

[0335] The sensitivity of the S. pneumoniae-specific assay with 40-cycle PCR protocols was determined by using purified genomic DNA from 9 isolates of S. pneumoniae. The detection limit was around 10 copies of genomic DNA for all of them.

[0336] Post-PCR hybridization with internal probes. The specificity of the multiplex PCR assay coupled with capture-probe hybridization was tested with 98 strains of S. pneumoniae, 16 strains of S. mitis and 3 strains of S. oralis. The internal probe specific to S. pneumoniae (SEQ ID NO. 1180) detected all 98 S. pneumoniae strains but did not hybridize to the S. mills and S. oralis amplicons. The three internal probes (SEQ ID NOs 2017-2019) specific to high-level resistance detected all the 43 strains with high-level penicillin resistance based on susceptibility testing. Among 12 isolates with intermediate-penicillin resistance based on susceptibility testing, 11 showed intermediate-penicillin resistance based on hybridization with 4 internal probes (SEQ ID NOs. 2020-2023) and one strain having penicillin MIC of 0.25 μg/ml was misclassified as high-level penicillin resistance. In summary, the combination of the multiplex PCR and hybridization assays results in a highly specific test for the detection of penicillin-resistant Streptococcus pneumoniae.

### Example 21

### Sequencing of the Vancomycin Resistance vanA, vanC1, vanC2 and vanC3 Genes

[0337] The publicly available sequences of the vanH-vanA-vanX-vanY locus of transposon Tnl546 from E. faecalis, vanC1 sequence from one strain of E. gallinarum, vanC2 and vanC3 sequences from a variety of E. casseliflavus and E. flavescens strains, respectively, allowed the design of PCR primers able to amplify the vanA, vanC1, vanC2 and vanC3 sequences of several Enterococcus species. Using primer pairs van6877 and van9106 (SEQ ID NOs. 1150 and 1155), vanC1-122 and vanC1-1315 (SEQ ID NOs. 1110 and 1109), and vanC2C3-1 and vanC2C3-1064 (SEQ ID NOs. 1108 and 1107), it was possible to amplify and determine vanA sequences SEQ ID NOs. 1049-1057, vanC1 sequences SEQ ID NOs. 1058-1059, vanC2 sequences SEQ ID NOs. 1060-1063 and vanC3 sequences SEQ ID NOs. 1064-1066, respectively. Four other PCR primers (SEQ ID NOs. 1151-1154) were also designed and used to complete the sequencing of vanA amplification products.

### Example 22

### Development of a PCR Assay for the Detection and Identification of Enterococci at Genus and Species Levels and its Associated Resistance Genes vanA and vanB

[0338] The comparison of vanA and vanB sequences revealed conserved regions allowing the design of PCR primers specific to both vanA and vanB sequences (Annex XXXVIII). The PCR primer pair vanAB459 and vanAB830R (SEQ ID NOs. 1112 and 1111) was used in multiplex with the Enterococcus-specific primers Encg313dF and Encg599c (SEQ ID NOs. 1137 and 1136) described in Example 11. Sequence alignment analysis of vanA and vanB sequences revealed regions suitable for the design of internal probes specific to vanA (SEQ ID NO. 1170) and vanB (SEQ ID NO. 1171). PCR amplification and agarose gel electrophoresis of the amplified products were performed as described in Example 11. The optimal cycling conditions for maximum sensitivity and specificity were found to be 3 min. at 94° C., followed by forty cycles of two steps consisting of 1 second at 95° C. and 30 seconds at 62° C., plus a terminal extension at 72° C. for 2 minutes. The specificity of the multiplex assay with 40-cycle PCR was verified by using 0.1 nanogram of purified genomic DNA from a panel of bacteria listed in Table 10. The sensitivity of the multiplex assay with 40-cycle PCR was verified with three strains of E. casseliflavus, eight strains of E. gallinarum, two strains of E. flavescens, two vancomycin-resistant strains of E. faecalis and one vancomycin-sensitive strain of E. faecalis, three vancomycin-resistant strains of E. faecium, one vancomycin-sensitive strain of E. faecium and one strain of each of the other enterococcal species listed in Table 10. The detection limit was 1 to 10 copies of genomic DNA, depending on the enterococcal species tested. The vanA- and vanB-specific internal probes (SEQ ID NOs. 1170 and 1171), as well as the E. faecalis- and E. faecium-specific internal probes (SEQ ID NOs. 1174 and 602) and the internal probe specific to the group including E. casseliflavus, E. gallinarum and E. flavescens (SEQ ID NO. 1122) described in Example 11, were able to recognize vancomycin-resistant enterococcal species with high sensitivity, specificity and ubiquity showing a perfect correlation between the genotypic and phenotypic analysis.

[0339] The format of the assay is not limited to the one described above. A person skilled in the art could adapt the assay for different formats such as PCR with real-time detection using molecular beacon probes. Molecular beacon probes designed to be used in this assay include, but are not limited to, SEQ ID NO. 1236 for the detection of E. faecalis, SEQ ID NO. 1235 for the detection of E. faecium, SEQ ID NO. 1240 for the detection of vanA, and SEQ ID NO. 1241 for the detection of vanB.

### Example 23

### Development of a Multiplex PCR Assay for Detection and Identification of Vancomycin-Resistant Organisms Including Enterococcus faecalis, Enterococcus faecium and the Group Including Enterococcus gallinarum, Enterococcus Casseliflavus, and Enterococcus flavescens.

[0340] The vanA and vanB genes encode the major glycopeptide resistance phenotypes in vancomycin resistant microorganisms. To design an assay to detect vancomycin resistant microorganisms, the nucleotide sequence of the vanA and vanB genes were analyzed. FIGS. 13 and 14 show a nucleotide sequence alignment of the vanA and vanB genes from the bacterial strains listed in Tables 26 and 27, respectively. Shown above the sequence alignments is a consensus DNA sequence derived from the multiple sequences. The analysis of vanA and vanB sequences revealed conserved regions allowing design of PCR primer pairs (SEQ ID NOs. 1089 and 1090 and SEQ ID NOs: 1090 and 1091) specific to vanA sequences (Annex XXVIII) and PCR primer pairs (SEQ ID NOs. 1095 and 1096 and SEQ ID NOs: 2298 and 1096) specific to vanB sequences (Annex XXIX). Shown below the sequence alignments in FIGS. 13 and 14 is the sequence and location of the vanA primers SEQ ID NO: 1090 and 1091 and the vanB primers SEQ ID NOs: 2298 and 1096, respectively. Also shown are the sequence and location of molecular beacon probes, SEQ ID NOs: 2299, 2300, designed for the detection of the vanA and vanB amplification products, respectively. SEQ ID NO: 2299. The vanA molecular beacon (SEQ ID NO: 2299) contains a 5′ carboxyfluorescein (FAM) fluorophore. The vanB molecular beacon (SEQ ID NO: 2300) contains a sulforhodamine active ester (Texas Red) at its 5′ end. Both beacons contain the nonfluorescent quencher moiety dabcyl chloride (DABCYL) at their 3′ ends.

[0341] An internal control DNA, pERVd (SEQ ID NO: 2302) was designed for the vanR assay. The primers of SEQ ID NO: 1090 and SEQ ID NO: 1096 can hybridize to produce and amplification product from the internal control DNA. A molecular beacon probe (SEQ ID NO: 2301) was designed to detect the amplification product of the internal control DNA. SEQ ID NO: 2301 contains a 5′ tetrachlorofluorescein (TET) fluorophore and the DABCYL quencher moiety at its 3′ end.

[0342] In a first experiment, the vanA-specific PCR primer pair (SEQ ID. NOs. 1089 and 1090) was used in multiplex with the vanB-specific PCR primer pair described in our assigned U.S. Pat. No. 5,994,066 (SEQ ID NOs. 1095 and 1096 in the present patent and SEQ ID NOs. 231 and 232 in the said patent). The comparison of vanC1, vanC2 and vanC3 sequences revealed conserved regions allowing design of PCR primers (SEQ ID NOs. 1101 and 1102) able to generate a 158-bp amplicon specific to the group including E. gallinarum, E. casseliflavus and E. flavescens (Annex XXX). The vanC-specific PCR primer pair (SEQ ID NOs. 1101 and 1102) was used in multiplex with the E. faecalis-specific PCR primer pair described in our assigned U.S. Pat. No. 5,994,066 (SEQ ID NOs. 40 and 41 in the said patent) and with the E. faecium-specific PCR primer pair described in our patent publication WO98/20157 (SEQ ID NOs. 1 and 2 in the said publication). For both multiplexes, the optimal cycling conditions for maximum sensitivity and specificity were found to be 3 min. at 94° C., followed by forty cycles of two steps consisting of 1 second at 95° C. and 30 seconds at 58° C., plus a terminal extension at 72° C. for 2 minutes. Detection of the PCR products was made by electrophoresis in agarose gels (2%) containing 0.25 μg/ml of ethidium bromide. The vanA-specific PCR primer pair (SEQ ID NOs. 1089 and 1090), the vanB-specific primer pair (SEQ ID NOs. 1095 and 1096) and the vanC-specific primer pair (SEQ ID NOs. 1101 and 1102) were tested for their specificity by using 0.1 nanogram of purified genomic DNA from a panel of 5 vancomycin-sensitive Enterococcus species, 3 vancomycin-resistant Enterococcus species, 13 other gram-positive bacteria and one gram-negative bacterium. Specificity tests were performed with the E. faecium-specific PCR primer pair described in our patent publication WO98/20157 (SEQ ID NOs. 1 and 2 in the said publication) and with the E. faecalis-specific PCR primer pair described in our assigned U.S. Pat. No. 5,994,066 (SEQ ID NOs. 40 and 41 in the said patent) on a panel of 37 gram-positive bacterial species. All Enterococcus strains were amplified with high specificity showing a perfect correlation between the genotypic and phenotypic analysis. The sensitivity of the assays was determined for several strains of E. gallinarum, E. casseliflavus, E. flavescens and vancomycin-resistant E. faecalis and E. faecium. Using each of the E. faecalis- and E. faecium-specific PCR primer pairs as well as vanA-, vanB- and vanC-specific PCR primers used alone or in multiplex as described above, the sensitivity ranged from 1 to 10 copies of genomic DNA.

[0343] The format of the assay is not limited to the one described above. A person skilled in the art could adapt the assay for different formats such as PCR with real-time detection using molecular beacon probes. Molecular beacon probes designed to be used in this assay include, but are not limited to, SEQ ID NO. 1238 for the detection of E. faecalis, SEQ ID NO. 1237 for the detection of E. faecium, SEQ ID NO. 1239 for the detection of vanA, and SEQ ID NO. 1241 for the detection of vanB.

[0344] Another PCR assay was developed for the detection of vancomycin-resistant E. faecium and vancomycin-resistant E. faecalis. This assay included two multiplex: (1) the first multiplex contained the vanA-specific primer pair (SEQ ID NOs. 1090-1091) and the vanB-specific PCR primer pair described in our assigned U.S. Pat. No. 5,994,066 (SEQ ID NOs. 1095 and 1096 in the present patent and SEQ ID NOs. 231 and 232 in the said patent), and (2) the second multiplex contained the E. faecalis-specific PCR primer pair described in our assigned U.S. Pat. No. 5,994,066 (SEQ ID NOs. 40 and 41 in the said patent) and the E. faecium-specific PCR primer pair described in our patent publication WO98/20157 (SEQ ID NOs. 1 and 2 in the said publication). For both multiplexes, the optimal cycling conditions for maximum sensitivity and specificity were found to be 3 min. at 94° C., followed by forty cycles of two steps consisting of 1 second at 95° C. and 30 seconds at 58° C., plus a terminal extension at 72° C. for 2 minutes. Detection of the PCR products was made by electrophoresis in agarose gels (2%) containing 0.25 μg/ml of ethidium bromide. The two multiplexes were tested for their specificity by using 0.1 nanogram of purified genomic DNA from a panel of two vancomycin-sensitive E. faecalis strains, two vancomycin-resistant E. faecalis strains, two vancomycin-sensitive E. faecium strains, two vancomycin-resistant E. faecium strains, 16 other enterococcal species and 31 other gram-positive bacterial species. All the E. faecium and E. faecalis strains were amplified with high specificity showing a perfect correlation between the genotypic analysis and the susceptibility to glycopeptide antibiotics (vancomycin and teicoplanin). The sensitivity of the assay was determined for two vancomycin-resistant E. faecalis strains and two vancomycin-resistant E. faecium strains. The detection limit was 5 copies of genomic DNA for all the strains.

[0345] This multiplex PCR assay was coupled with capture-probe hybridization. Four internal probes were designed: one specific to the vanA amplicon (SEQ ID NO. 2292), one specific to the vanB amplicon (SEQ ID NO. 2294), one specific to the E. faecalis amplicon (SEQ ID NO. 2291) and one specific to the E. faecium amplicon (SEQ ID NO. 2287). Each of the internal probes detected their specific amplicons with high specificity and sensitivity.

### The VanR Assay

### Development

[0346] In a next set of experiments, a multiplex real-time PCR reaction (the VanR assay) using the vanA primer pair SEQ ID NO: 1090 and 1091, the vanB primer pair SEQ ID NO: 1096 and 2298, the internal control DNA SEQ ID NO: 2302, and the molecular beacon probes SEQ ID NOs: 2299, 2300, and 2301 was performed.

[0347] For the template DNA, purified genomic DNA from vanA resistant Enterococcus faecium or vanB resistant Enterococcus faecalis was obtained from strains grown on blood agar plates under standard conditions. Genomic DNA was extracted from the cultures using the GNOME kit (QBIOgene, Carlsbad, Calif.) according to the manufacturer's instructions. Template DNA samples were treated with RNase prior to quantitation. Genomic DNA concentration was determined and the quality of the genomic DNA preparations was confirmed using conventional methods.

[0348] Lyophilized reagents listed in Table 24 were used for the VanR assay. The lyophilized reagents were reconstituted with 225 μl diluent (116 mM Tris-HCl, pH 8.3, 11.6 mM KCl, 3.48 mM MgCl₂, 5.8 mM NH₂SO₄) and subsequently divided into 25 μl aliquots. 0.5, 2.5, 5, 10 or 20 copies of template DNA was added to each of 5 replicate reactions.

[0349] The VanR assay PCR was run in a SMART CYCLER™ PCR machine under the following conditions: 60° C. for 6 sec, followed by 95° C. for 900 sec, followed by 45 cycles of 95° C. for 5 seconds, 63° C. for 10 sec and 72° C. for 20 sec. The fluorescent readout from the FAM channel (vanA) and the Texas Red channel (vanB) of the reactions is shown in FIGS. 13A and 13B, respectively. The VanR assay is capable of detecting 5 copies of vanA target DNA in a sample (FIG. 13A) and of detecting 10 copies of vanB target DNA in a sample (FIG. 13B). For each concentration of template DNA, the number of positive assay results out of each of the five replicates was recorded (Table 15).

### Specificity

[0350] To demonstrate the specificity of the VanR assay, vanC, vanD, vanE, and vanG resistant enterococci, other closely related bacteria, normal and pathogenic anal or fecal flora, or human DNA as listed in Tables 16-18 were assayed as follows: VanR assay lyophilized reagents (Table 38) were reconstituted with 225 μl diluent and aliquoted as described above. Template DNA was prepared using conventional methods and diluted in sample preparation buffer to a final concentration of 0.33 ng/μl. 3 μl template DNA was added to each master mix, and the reaction was carried out as described above in the SMART CYCLER™ PCR machine. 41 electrophoresis loading buffer was added to the reactions upon completion, and 15 μl of each reaction was run on an agarose gel to view the PCR amplification products, as shown in FIGS. 14-17.

[0351] To assess the specificity of the molecular beacons in the VanR assay, PCR assays were preformed to test cross-reactivity with amplified vanA and vanB target DNA and internal control DNA. The reaction components listed in Table 34 were each added to premix in Table 33. For each reaction, 25.8 μl of the final mix was combined with 3 μl template DNA (either 25 copies vanA DNA or 50 copies vanB DNA) or TE buffer (1×), as indicated. The reactions were performed in the SMART CYCLER™ PCR machine using the VanR assay conditions as described above. Table 35 shows the results of the experiment. Positive results were obtained in the FAM channel in every reaction that contained vanA template DNA and the vanA primers. Positive results were obtained in the Texas Red channel in every reaction that contained vanB template DNA and vanB primers. Positive results obtained in the TET channel in every reaction that contained internal control template DNA and internal control primers.

[0352] Negative results were obtained in each channel for every reaction that did not contain a target DNA that could be amplified and detected using the indicated molecular beacon probe. In other words, the molecular beacon probes did not cross-react with non-specific DNAs. FIGS. 18A-20B show the fluorescent readouts of the experiments.

Validation with Clinical Samples

[0353] To validate the VanR assay, the sensitivity of the VanR assay was performed on clinical samples. Briefly, the VanR assay lyophilized reagents listed in Table 38 were reconstituted in 225 μl diluent and aliquoted as described above. DNA isolation and quantitation was performed using conventional techniques. The samples were processed in a SMART CYCLER' PCR machine using the VanR reaction conditions described above.

[0354] FIG. 21 shows the fluorescent readout in the FAM (vanA) channel and the Texas Red channel (vanB) from a specimen that is vanA resistant. The reaction gave a positive result in the FAM channel but not the Texas Red channel. FIG. 22 shows the fluorescent readout in the FAM and Texas Red channels from a combination of a vanA resistant specimen and a vanB resistant specimen. Positive results were obtained in both the FAM and the Texas Red channel. FIG. 23 shows the fluorescent readout in the FAM and Texas Red channels from a vanB positive specimen. The results were negative in the FAM channel, and positive in the Texas Red channel.

### Sensitivity

[0355] To assess the sensitivity of the VanR assay, template DNA isolated from enterococci from various geographic regions, and on template DNA from vanB resistant bacterial species other than enterococci was isolated and tested in the VanR assay as described above. Table 36 lists the enterococcal strains from various regions in the world tested in the assay. The table identifies the vanA and vanB phenotype of each strain. PCR amplification products were detected by running a sample of each reaction on an agarose gel, shown in FIG. 24. vanA or vanB PCR amplification products were detectable in each of the strains tested. Table 37 lists non-enterococcal, vanB resistant strains tested in the VanR assay. The PCR amplification products are shown in FIG. 25. The reaction produced an amplification product of the expected size for the vanB amplicon.

[0356] These results demonstrate that the VanR assay is sensitive and specific.

### Example 24

### Universal Amplification Involving the EF-G (fusA) Subdivision of tuf Sequences

[0357] As shown in FIG. 3, primers SEQ ID NOs. 1228 and 1229 were designed to amplify the region between the end of fusA and the beginning of tuf genes in the str operon. Genomic DNAs from a panel of 35 strains were tested for PCR amplification with those primers. In the initial experiment, the following strains showed a positive result: Abiotrophia adiacens ATCC 49175, Abiotrophia defectiva ATCC 49176, Bacillus subtilis ATCC 27370, Clostridium difficile ATCC 9689, Enterococcus avium ATCC 14025, Enterococcus casseliflavus ATCC 25788, Enterococcus cecorum ATCC 43198, Enterococcus faecalis ATCC 29212, Enterococcus faecium ATCC 19434, Enterococcus flavescens ATCC 49996, Enterococcus gallinarum ATCC 49573, Enterococcus solitarius ATCC 49428, Escherichia coli ATCC 11775, Haemophilus influenzae ATCC 9006, Lactobacillus acidophilus ATCC 4356, Peptococcus niger ATCC 27731, Proteus mirabilis ATCC 25933, Staphylococcus aureus ATCC 43300, Staphylococcus auricularis ATCC 33753, Staphylococcus capitis ATCC 27840, Staphylococcus epidemidis ATCC 14990, Staphylococcus haemolyticus ATCC 29970, Staphylococcus hominis ATCC 27844, Staphylococcus lugdunensis ATCC 43809, Staphylococcus saprophyticus ATCC 15305, Staphylococcus simulans ATCC 27848, and Staphylococcus warneri ATCC 27836. This primer pair could amplify additional bacterial species; however, there was no amplification for some species, suggesting that the PCR cycling conditions could be optimized or the primers modified. For example, SEQ ID NO. 1227 was designed to amplify a broader range of species.

[0358] In addition to other possible primer combinations to amplify the region covering fusA and tuf, FIG. 3 illustrates the positions of amplification primers SEQ ID NOs. 1221-1227 which could be used for universal amplification of fusA segments. All of the above mentioned primers (SEQ ID NOs. 1221-1229) could be useful for the universal and/or the specific detection of bacteria.

[0359] Moreover, different combinations of primers SEQ ID NOs. 1221-1229, sometimes in combination with tuf sequencing primer SEQ ID NO. 697, were used to sequence portions of the str operon, including the intergenic region. In this manner, the following sequences were generated: SEQ ID NOs. 1518-1526, 1578-1580, 1786-1821, 1822-1834, 1838-1843, 2184, 2187, 2188, 2214-2249, and 2255-2269.

### Example 25

### DNA Fragment Isolation from Staphylococcus saprophyticus by Arbitrarily Primed PCR

[0360] DNA sequences of unknown coding potential for the species-specific detection and identification of Staphylococcus saprophyticus were obtained by the method of arbitrarily primed PCR (AP-PCR).

[0361] AP-PCR is a method which can be used to generate specific DNA probes for microorganisms (Fani et al., 1993, Molecular Ecology 2:243-250). A description of the AP-PCR protocol used to isolate a species-specific genomic DNA fragment from Staphylococcus saprophyticus follows. Twenty different oligonucleotide primers of 10 nucleotides in length (all included in the AP-PCR kit OPAD (Operon Technologies, Inc., Alameda, Calif.)) were tested systematically with DNAs from 5 bacterial strains of Staphylococcus saprophyticus as well as with bacterial strains of 27 other staphylococcal (non-S. saprophyticus) species. For all bacterial species, amplification was performed directly from one μL (0.1 ng/μL) of purified genomic DNA. The 25 μL PCR reaction mixture contained 50 mM KCl, 10 mM Tris-HCl (pH 9.0), 0.1% Triton X-100, 2.5 mM MgCl₂, 1.2 μM of only one of the 20 different AP-PCR primers OPAD, 200 μM of each of the four dNTPs, 0.5 U of Taq DNA polymerase (Promega Corp., Madison, Wis.) coupled with TaqStart™ antibody (Clontech Laboratories Inc., Palo Alto, Calif.). PCR reactions were subjected to cycling using a MJ Research PTC-200 thermal cycler as follows: 3 min at 96° C. followed by 42 cycles of 1 min at 94° C. for the denaturation step, 1 min at 31° C. for the annealing step and 2 min at 72° C. for the extension step. A final extension step of 7 min at 72° C. followed the 42 cycles to ensure complete extension of PCR products. Subsequently, twenty microliters of the PCR-amplified mixture were resolved by electrophoresis on a 1.5% agarose gel containing 0.25 μg/ml of ethidium bromide. The size of the amplification products was estimated by comparison with a 50-bp molecular weight ladder.

[0362] Amplification patterns specific for Staphylococcus saprophyticus were observed with the AP-PCR primer OPAD-16 (sequence: 5′-AACGGGCGTC-3′). Amplification with this primer consistently showed a band corresponding to a DNA fragment of approximately 380 by for all Staphylococcus saprophyticus strains tested but not for any of the other staphylococcal species tested.

[0363] The band corresponding to the 380 by amplicon, specific and ubiquitous for S. saprophyticus based on AP-PCR, was excised from the agarose gel and purified using the QIAquick™ gel extraction kit (QIAGEN Inc.). The gel-purified DNA fragment was cloned into the T/A cloning site of the pCR 2.1™ plasmid vector (Invitrogen Inc.) using T4 DNA ligase (New England BioLabs). Recombinant plasmids were transformed into E. coli DH5α competent cells using standard procedures. All reactions were performed according to the manufacturer's instructions. Plasmid DNA isolation was done by the method of Birnboim and Doly (Nucleic Acid Res., 1979, 7:1513-1523) for small-scale preparations. All plasmid DNA preparations were digested with the EcoRI restriction endonuclease to ensure the presence of the approximately 380 by AP-PCR insert into the plasmid. Subsequently, a large-scale and highly purified plasmid DNA preparation was performed from two selected clones shown to carry the AP-PCR insert by using the QIAGEN plasmid purification kit (midi format). These large-scale plasmid preparations were used for automated DNA sequencing.

[0364] The 380 by nucleotide sequence was determined for three strains of S. saprophyticus (SEQ ID NOs. 74, 1093, and 1198). Both strands of the AP-PCR insert from the two selected clones were sequenced by the dideoxynucleotide chain termination sequencing method with SP6 and T7 sequencing primers by using the Applied Biosystems automated DNA sequencer (model 373A) with their PRISM™ Sequenase® Terminator Double-stranded DNA Sequencing Kit (Applied Biosystems, Foster City, Calif.).

[0365] Optimal species-specific amplification primers (SEQ ID NOs. 1208 and 1209) have been selected from the sequenced AP-PCR Staphylococcus saprophyticus DNA fragments with the help of the primer analysis software Oligo™ 5.0 (National BioSciences Inc). The selected primers were tested in PCR assays to verify their specificity and ubiquity. Data obtained with DNA preparations from reference ATCC strains of 49 gram-positive and 31 gram-negative bacterial species, including 28 different staphylococcal species, indicate that the selected primer pairs are specific for Staphylococcus saprophyticus since no amplification signal has been observed with DNAs from the other staphylococcal or bacterial species tested. This assay was able to amplify efficiently DNA from all 60 strains of S. saprophyticus from various origins tested. The sensitivity level achieved for three S. saprophyticus reference ATCC strains was around 6 genome copies.

### Example 26

### Sequencing of Prokaryotic tuf Gene Fragments

[0366] The comparison of publicly available tuf sequences from a variety of bacterial species revealed conserved regions, allowing the design of PCR primers able to amplify tuf sequences from a wide range of bacterial species. Using primer pair SEQ ID NOs. 664 and 697, it was possible to amplify and determine tuf sequences SEQ ID NOs.: 1-73, 75-241, 607-618, 621, 662, 675, 717-736, 868-888, 932, 967-989, 992, 1002, 1572-1575, 1662-1663, 1715-1733, 1835-1837, 1877-1878, 1880-1881, 2183, 2185, 2200, 2201, and 2270-2272.

### Example 27

### Sequencing of Procaryotic recA Gene Fragments

[0367] The comparison of publicly available recA sequences from a variety of bacterial species revealed conserved regions, allowing the design of PCR primers able to amplify recA sequences from a wide range of bacterial species. Using primer pairs SEQ ID NOs. 921-922 and 1605-1606, it was possible to amplify and determine recA sequences SEQ ID NOs.: 990-991, 1003, 1288-1289, 1714, 1756-1763, 1866-1873 and 2202-2212.

### Example 28

### Specific Detection and Identification of Escherichia coli/Shigella Sp. Using tuf Sequences

[0368] The analysis of tuf sequences from a variety of bacterial species allowed the selection of PCR primers (SEQ ID NOs. 1661 and 1665) and of an internal probe (SEQ ID NO. 2168) specific to Escherichia coli/Shigella sp. The strategy used to design the PCR primers was based on the analysis of a multiple sequence alignment of various tuf sequences. The multiple sequence alignment included the tuf sequences of Escherichia coli/Shigella sp. as well as tuf sequences from other species and bacterial genera, especially representatives of closely related species. A careful analysis of this alignment allowed the selection of oligonucleotide sequences which are conserved within the target species but which discriminate sequences from other species, especially from the closely related species, thereby permitting the species-specific and ubiquitous detection and identification of the target bacterial species.

[0369] The chosen primer pair, oligos SEQ ID NOs. 1661 and 1665, gives an amplification product of 219 bp. Standard PCR was carried out using 0.4 μM of each primer, 2.5 mM MgCl₂, BSA 0.05 mM, 50 mM KCl, 10 mM Tris-HCl (pH 9.0), 0.1% Triton X-100, dNTPs 0.2 mM (Pharmacia), 0.5 U Taq DNA polymerase (Promega) coupled with TaqStart™ antibody (Clontech Laboratories Inc.), 1 μl of genomic DNA sample in a final volume of 20 μl using a PTC-200 thermocycler (MJ Research). The optimal cycling conditions for maximum sensitivity and specificity were 3 minutes at 95° C. for initial denaturation, then forty cycles of two steps consisting of 1 second at 95° C. and 30 seconds at 60° C., followed by terminal extension at 72° C. for 2 minutes. Detection of the PCR products was made by electrophoresis in agarose gels (2%) containing 0.25 μg/ml of ethidium bromide. Visualization of the PCR products was made under UV at 254 nm.

[0370] Specificity of the assay was tested by adding to the PCR reactions 0.1 ng of genomic DNA from each of the following bacterial species: Escherichia coli (7 strains), Shigella sonnei, Shigella flexneri, Shigella dysenteriae, Salmonella typhimyurium, Salmonella typhi, Salmonella enteritidis, Tatumella ptyseos, Klebsiella pneumoniae (2 strains), Enterobacter aerogenes, Citrobacter farmeri, Campylobacter jejuni, Serratia marcescens. Amplification was observed only for the Escherichia coli and Shigella sp. strains listed and Escherichia fergusonii. The sensitivity of the assay with 40-cycle PCR was verified with one strain of E. coli and three strains of Shigella sp. The detection limit for E. coli and Shigella sp. was 1 to 10 copies of genomic DNA, depending on the strains tested.

### Example 29

### Specific Detection and Identification of Klebsiella pneumoniae Using atpD Sequences

[0371] The analysis of atpD sequences from a variety of bacterial species allowed the selection of PCR primers specific to K. pneumoniae. The primer design strategy is similar to the strategy described in Example 28 except that atpD sequences were used in the alignment.

[0372] Two K. pneumoniae-specific primers were selected, (SEQ ID NOs. 1331 and 1332) which give an amplification product of 115 bp. Standard PCR was carried out on PTC-200 thermocyclers (MJ Research) using 0.4 μM of each primer as described in Example 28. The optimal cycling conditions for maximum sensitivity and specificity were as follow: three minutes at 95° C. for initial denaturation, then forty cycles of two steps consisting of 1 second at 95° C. and 30 seconds at 55° C., followed by terminal extension at 72° C. for 2 minutes.

[0373] Specificity of the assay was tested by adding to the PCR reactions 0.1 ng of genomic DNA from each of the following bacterial species: Klebsiella pneumoniae (2 strains), Klebsiella ornitholytica, Klebsiella oxytoca (2 strains), Klebsiella planticola, Klebsiella terrigena, Citrobacter freundii, Escherichia coli, Salmonella cholerasuis typhi, Serratia marcescens, Enterobacter aerogenes, Proteus vulgaris, Kluyvera ascorbata, Kluyvera georgiana, Kluyvera cryocrescens and Yersinia enterolitica. Amplification was detected for the two K. pneumoniae strains, K. planticola, K. terrigena and the three Kluyvera species tested. Analysis of the multiple alignment sequence of the atpD gene allowed the design of an internal probe SEQ ID NO. 2167 which can discriminate Klebsiella pneumoniae from other Klebsiella sp. and Kluyvera sp. The sensitivity of the assay with 40-cycle PCR was verified with one strain of K. pneumoniae. The detection limit for K. pneumoniae was around 10 copies of genomic DNA.

### Example 30

### Specific Detection and Identification of Acinetobacter baumannii Using atpD Sequences

[0374] The analysis of atpD sequences from a variety of bacterial species allowed the selection of PCR primers specific to Acinetobacter baumannii. The primer design strategy is similar to the strategy described in Example 28.

[0375] Two A. baumannii-specific primers were selected, SEQ ID NOs. 1690 and 1691, which give an amplification product of 233 bp. Standard PCR was carried out on PTC-200 thermocyclers (MJ Research) using 0.4 μM of each primer as described in Example 28. The optimal cycling conditions for maximum sensitivity and specificity were as follow: three minutes at 95° C. for initial denaturation, then forty cycles of two steps consisting of 1 second at 95° C. and 30 seconds at 60° C., followed by terminal extension at 72° C. for 2 minutes.

[0376] Specificity of the assay was tested by adding to the PCR reactions 0.1 ng of genomic DNA from each of the following bacterial species: Acinetobacter baumannii (3 strains), Acinetobacter anitratus, Acinetobacter lwoffi, Serratia marcescens, Enterobacter cloacae, Enterococcus faecalis, Pseudomonas aeruginosa, Psychrobacter phenylpyruvicus, Neisseria gonorrheoae, Haemophilus haemoliticus, Yersinia enterolitica, Proteus vulgaris, Eikenella corrodens, Escherichia coli. Amplification was detected only for A. baumannii, A. anitratus and A. lwoffi. The sensitivity of the assay with 40-cycle PCR was verified with two strains of A. baumannii. The detection limit for the two A. baumannii strains tested was 5 copies of genomic DNA. Analysis of the multiple alignment sequence of the atpD gene allowed the design of a A. baumannii-specific internal probe (SEQ ID NO. 2169).

### Example 31

### Specific Detection and Identification of Neisseria gonorrhoeae Using tuf Sequences

[0377] The analysis of tuf sequences from a variety of bacterial species allowed the selection of PCR primers specific to Neisseria gonorrhoeae. The primer design strategy is similar to the strategy described in Example 28.

[0378] Two N. gonorrhoeae-specific primers were selected, SEQ ID NOs. 551 and 552, which give an amplification product of 139 bp. PCR amplification was carried out on PTC-200 thermocyclers (MJ Research) using 0.4 μM of each primer as described in Example 28. The optimal cycling conditions for maximum sensitivity and specificity were as follow: three minutes at 95° C. for initial denaturation, then forty cycles of two steps consisting of 1 second at 95° C. and 30 seconds at 65° C., followed by terminal extension at 72° C. for 2 minutes.

[0379] Specificity of the assay was tested by adding into the PCR reactions, 0.1 ng of genomic DNA from each of the following bacterial species: Neisseria gonorrhoeae (19 strains), Neisseria meningitidis (2 strains), Neisseria lactamica, Neisseria flavescens, Neisseria animalis, Neisseria canis, Neisseria cuniculi, Neisseria elongata, Neisseria mucosa, Neisseria polysaccharea, Neisseria sicca, Neisseria subflava, Neisseria weaveri. Amplification was detected only for N. gonorrhoeae, N. sicca and N. polysaccharea. The sensitivity of the assay with 40-cycle PCR was verified with two strains of N. gonorrhoeae. The detection limit for the N. gonorrhoeae strains tested was 5 copies of genomic DNA. Analysis of the multiple alignment sequence of the tuf gene allowed the design of an internal probe, SEQ ID NO. 2166, which can discriminate N. gonorrhoeae from N. sicca and N. polysaccharea.

### Example 32

### Sequencing of Bacterial gyrA and parC Gene Fragments. SEQUENCING of Bacterial gyrA and parC Fragments

[0380] One of the major mechanism of resistance to quinolone in various bacterial species is mediated by target changes (DNA gyrase and/or topoisomerase IV). These enzymes control DNA topology and are vital for chromosome function and replication. Each of these enzymes is a tetramer composed of two subunits: GyrA and GyrB forming A₂B₂ complex in DNA gyrase; and ParC and ParE forming and C₂E₂ complex in DNA topoisomerase IV. It has been shown that they are hotspots, called the quinolone-resistance-determining region (QRDR) for mutations within gyrA that encodes for the GyrA subunit of DNA gyrase and within parC that encodes the parC subunit of topoisomerase IV.

[0381] In order to generate a database for gyrA and parC sequences that can be used for design of primers and/or probes for the specific detection of quinolone resistance in various bacterial species, gyrA and parC DNA fragments selected from public database (GenBanK and EMBL) from a variety of bacterial species were used to design oligonucleotide primers.

[0382] Using primer pair SEQ ID NOs. 1297 and 1298, it was possible to amplify and determine gyrA sequences from Klebsiella oxytoca (SEQ ID NO. 1764), Klebsiella pneumoniae subsp. ozaneae (SEQ ID NO. 1765), Klebsiella planticola (SEQ ID NO. 1766), Klebsiella pneumoniae (SEQ ID NO. 1767), Klebsiella pneumoniae subsp. pneumoniae (two strains) (SEQ ID NOs. 1768-1769), Klebsiella pneumoniae subsp. rhinoscleromatis (SEQ ID NO. 1770), Klebsiella terrigena (SEQ ID NO. 1771), Kluyvera ascorbata (SEQ ID NO. 2013), Kluyvera georgiana (SEQ ID NO. 2014) and Escherichia coli (4 strains) (SEQ ID NOs. 2277-2280). Using primer pair SEQ ID NOs. 1291 and 1292, it was possible to amplify and determine gyrA sequences from Legionella pneumophila subsp. pneumophila (SEQ ID NO. 1772), Proteus mirabilis (SEQ ID NO. 1773), Providencia rettgeri (SEQ ID NO. 1774), Proteus vulgaris (SEQ ID NO. 1775) and Yersinia enterolitica (SEQ ID NO. 1776). Using primer pair SEQ ID NOs. 1340 and 1341, it was possible to amplify and determine gyrA sequence from Staphylococcus aureus (SEQ ID NO. 1255).

[0383] Using primers SEQ ID NOs. 1318 and 1319, it was possible to amplify and determine parC sequences from K oxytoca (two strains) (SEQ ID NOs. 1777-1778), Klebsiella pneumoniae subsp. ozaenae (SEQ ID NO. 1779), Klebsiella planticola (SEQ ID NO. 1780), Klebsiella pneumoniae (SEQ ID NO. 1781), Klebsiella pneumoniae subsp. pneumoniae (two strains) (SEQ ID NOs. 1782-1783), Klebsiella pneumoniae subsp. rhinoscleromatis (SEQ ID NO. 1784) and Klebsiella terrigena (SEQ ID NO. 1785).

### Example 33

### Development of a PCR Assay for the Specific Detection and Identification of Staphylococcus aureus and its Quinolone Resistance Genes gyrA and parC

[0384] The analysis of gyrA and parC sequences from a variety of bacterial species revealed conserved regions allowing the design of PCR primers specific to the quinolone-resistance-determining region (QRDR) of gyrA and parC from Staphylococcus aureus. PCR primer pair SEQ ID NOs. 1340 and 1341 was designed to amplify the gyrA sequence of S. aureus, whereas PCR primer pair SEQ ID NOs. 1342 and 1343 was designed to amplify S. aureus parC. The comparison of gyrA and parC sequences from S. aureus strains with various levels of quinolone resistance allowed the identification of amino acid substitutions Ser-84 to Leu, Glu-88 to Gly or Lys in the GyrA subunit of DNA gyrase encoded by gyrA and amino acid changes Ser-80 to Phe or Tyr and Ala-116 to Glu in the ParC subunit of topoisomerase IV encoded by parC. These amino acid substitutions in GyrA and ParC subunits occur in isolates with intermediate- or high-level quinolone resistance. Internal probes for the specific detection of wild-type S. aureus gyrA (SEQ ID NO. 1940) and wild-type S. aureus parC (SEQ ID NO. 1941) as well as internal probes for the specific detection of each of the gyrA (SEQ ID NOs. 1333-1335) and parC mutations identified in quinolone-resistant S. aureus (SEQ ID NOs. 1336-1339) were designed.

[0385] The gyrA- and parC-specific primer pairs (SEQ ID NOs. 1340-1341 and SEQ ID NOs. 1342-1343) were used in multiplex. PCR amplification was carried out on PTC-200 thermocyclers (MJ Research) using 0.3, 0.3, 0.6 and 0.6 μM of each primers, respectively, as described in Example 28. The optimal cycling conditions for maximum sensitivity and specificity were 3 minutes at 95° C. for initial denaturation, then forty cycles of two steps consisting of 1 second at 95° C. and 30 seconds at 62° C., followed by terminal extension at 72° C. for 2 minutes. Detection of the PCR products was made by electrophoresis in agarose gels (2%) containing 0.25 μg/ml of ethidium bromide. The specificity of the multiplex assay with 40-cycle PCR was verified by using 0.1 ng of purified genomic DNA from a panel of gram-positive bacteria. The list included the following: Abiotrophia adiacens, Abiotrophia defectiva, Bacillus cereus, Bacillus mycoides, Enterococcus faecalis (2 strains), Enterococcus flavescens, Gemella morbillorum, Lactococcus lactis, Listeria innocua, Listeria monocytogenes, Staphylococcus aureus (5 strains), Staphylococcus auricalis, Staphylococcus capitis subsp. urealyticus, Staphylococcus carnosus, Staphylococcus chromogenes, Staphylococcus epidermidis (3 strains), Staphylococcus gallinarum, Staphylococcus haemolyticus (2 strains), Staphylococcus hominis, Staphylococcus hominis subsp hominis, Staphylococcuslentus, Staphylococcus lugdunensis, Staphylococcus saccharolyticus, Staphylococcus saprophyticus (3 strains), Staphylococcus simulans, Staphylococcus warneri, Staphylococcus xylosus, Streptococcus agalactiae, Streptococcus pneumoniae. Strong amplification of both gyrA and parC genes was only detected for the S. aureus strains tested. The sensitivity of the multiplex assay with 40-cycle PCR was verified with one quinolone-sensitive and four quinolone-resistant strains of S. aureus. The detection limit was 2 to 10 copies of genomic DNA, depending on the strains tested.

[0386] Detection of the hybridization with the internal probes was performed as described in Example 7. The internal probes specific to wild-type gyrA and parC of S. aureus and to the gyrA and parC variants of S. aureus were able to recognize two quinolone-resistant and one quinolone-sensitive S. aureus strains showing a perfect correlation with the susceptibility to quinolones.

[0387] The complete assay for the specific detection of S. aureus and its susceptibility to quinolone contains the Staphylococcus-specific primers (SEQ ID NOs. 553 and 575) described in Example 7 and the multiplex containing the S. aureus gyrA- and parC-specific primer pairs (SEQ ID NOs. 1340-1341 and SEQ ID NOs. 1342-1343). Amplification is coupled with post-PCR hybridization with the internal probe specific to S. aureus (SEQ ID NO. 587) described in Example 7 and the internal probes specific to wild-type S. aureus gyrA and parC (SEQ ID NOs. 1940-1941) and to the S. aureus gyrA and parC variants (SEQ ID NOs. 1333-1338).

[0388] An assay was also developed for the detection of quinolone-resistant S. aureus using the SmartCycler (Cepheid). Real-time detection is based on the use of S. aureus parC-specific primers (SEQ ID NOs. 1342 and 1343) and the Staphylococcus-specific primers (SEQ ID NOs. 553 and 575) described in Example 7. Internal probes were designed for molecular beacon detection of the wild-type S. aureus parC (SEQ ID NO. 1939), for detection of the Ser-80 to Tyr or Phe amino acid substitutions in the ParC subunit encoded by S. aureus parC (SEQ ID NOs. 1938 and 1955) and for detection of S. aureus (SEQ ID NO. 2282).

### Example 34

### Development of a PCR Assay for the Detection and Identification of Klebsiella pneumoniae and its Quinolone Resistance Genes gyrA and parC

[0389] The analysis of gyrA and parC sequences from a variety of bacterial species from the public databases and from the database described in Example 32 revealed conserved regions allowing the design of PCR primers specific to the quinolone-resistance-determining region (QRDR) of gyrA and parC from K. pneumoniae. PCR primer pair SEQ ID NOs. 1936 and 1937, or pair SEQ ID NOs. 1937 and 1942, were designed to amplify the gyrA sequence of K. pneumoniae, whereas PCR primer pair SEQ ID NOs. 1934 and 1935 was designed to amplify K. pneumoniae parC sequence. An alternative pair, SEQ ID NOs. 1935 and 1936, can also amplify K. pneumoniae parC. The comparison of gyrA and parC sequences from K. pneumoniae strains with various levels of quinolone resistance allowed the identification of amino acid substitutions Ser-83 to Tyr or Phe and Asp-87 to Gly or Ala and Asp-87 to Asn in the GyrA subunit of DNA gyrase encoded by gyrA and amino acid changes Ser-80 to Ile or Arg and Glu-84 to Gly or Lys in the ParC subunit of topoisomerase IV encoded by parC. These amino acid substitutions in the GyrA and ParC subunits occur in isolates with intermediate- or high-level quinolone resistance. Internal probes for the specific detection of wild-type K. pneumoniae gyrA (SEQ ID NO. 1943) and wild-type K. pneumoniae parC (SEQ ID NO. 1944) as well as internal probes for the specific detection of each of the gyrA (SEQ ID NOs. 1945-1949) and parC mutations identified in quinolone-resistant K. pneumoniae (SEQ ID NOs. 1950-1953) were designed.

[0390] Two multiplex using the K. pneumoniae gyrA- and parC-specific primer pairs were used: the first multiplex contained K. pneumoniae gyrA-specific primers (SEQ ID NOs. 1937 and 1942) and K. pneumoniae parC-specific primers (SEQ ID NOs. 1934 and 1935) and the second multiplex contained K. pneumoniae gyrA/parC-specific primer (SEQ ID NOs. 1936), K. pneumoniae gyrA-specific primer (SEQ ID NO. 1937) and K. pneumoniae parC-specific primer (SEQ ID NO. 1935). Standard PCR was carried out on PTC-200 thermocyclers (MJ Research) using for the first multiplex 0.6, 0.6, 0.4, 0.4 μM of each primer, respectively, and for the second multiplex 0.8, 0.4, 0.4 μM of each primer, respectively. PCR amplification and agarose gel electrophoresis of the amplified products were performed as described in Example 28. The optimal cycling conditions for maximum sensitivity and specificity were 3 minutes at 95° C. for initial denaturation, then forty cycles of two steps consisting of 1 second at 95° C. and 30 seconds at 62° C., followed by terminal extension at 72° C. for 2 minutes. The specificity of the two multiplex assays with 40-cycle PCR was verified by using 0.1 ng of purified genomic DNA from a panel of gram-negative bacteria. The list included: Acinetobacter baumannii, Citrobacter freundii, Eikenella corrodens, Enterobacter aerogenes, Enterobacter cancerogenes, Enterobacter cloacae, Escherichia coli (10 strains), Haemophilus influenzae, Klebsiella pneumoniae, Klebsiella ornitholytica, Klebsiella oxytoca (2 strains), Klebsiella planticola, Klebsiella terrigena, Kluyvera ascorbata, Kluyvera cryocrescens, Kluyvera georgiana, Neisseria gonorrhoeae, Proteus mirabilis, Proteus vulgaris, Pseudomonas aeruginosa, Salmonella choleraesuis subsp. typhimurium, Salmonella enteritidis, Serratia liquefaciens, Serratia marcescens and Yersinia enterocolytica. For both multiplex, strong amplification of both gyrA and parC was observed only for the K. pneumoniae strain tested. The sensitivity of the two multiplex assays with 40-cycle PCR was verified with one quinolone-sensitive strain of K. pneumoniae. The detection limit was around 10 copies of genomic DNA.

[0391] The complete assay for the specific detection of K. pneumoniae and its susceptibility to quinolone contains the Klebsiella-specific primers (SEQ ID NOs. 1331 and 1332) described in Example 29 and either the multiplex containing the K. pneumoniae gyrA- and parC-specific primers (SEQ ID NOs. 1935, 1936, 1937) or the multiplex containing the K. pneumoniae gyrA- and parC-specific primers (SEQ ID NOs. 1934, 1937, 1939, 1942). Amplification is coupled with post-PCR hybridization with the internal probe specific to K. pneumoniae (SEQ ID NO. 2167) described in Example 29 and the internal probes specific to wild-type K. pneumoniae gyrA and parC (SEQ ID NOs. 1943, 1944) and to the K. pneumoniae gyrA and parC variants (SEQ ID NOs. 1945-1949 and 1950-1953).

[0392] An assay was also developed for the detection of quinolone-resistant K. pneumoniae using the SmartCycler (Cepheid). Real-time detection is based on the use of resistant K. pneumoniae gyrA-specific primers (SEQ ID NOs. 1936 and 1937) and the K. pneumoniae-specific primers (SEQ ID NOs. 1331 and 1332) described in Example 29. Internal probes were designed for molecular beacon detection of the wild-type K. pneumoniae gyrA (SEQ ID NO. 2251), for detection of the Ser-83 to Tyr or Phe and/or Asp-87 to Gly or Asn in the GyrA subunit of DNA gyrase encoded by gyrA (SEQ ID NOs. 2250) and for detection of K. pneumoniae (SEQ ID NO. 2281).

### Example 35

### Development of a PCR Assay for Detection and Identification of S. pneumoniae and its Quinolone Resistance Genes gyrA and parC

[0393] The analysis of gyrA and parC sequences from a variety of bacterial species revealed conserved regions allowing the design of PCR primers able to amplify the quinolone-resistance-determining region (QRDR) of gyrA and parC from all S. pneumoniae strains. PCR primer pair SEQ ID NOs. 2040 and 2041 was designed to amplify the QRDR of S. pneumoniae gyrA, whereas PCR primer pair SEQ ID NOs. 2044 and 2045 was designed to amplify the QRDR of S. pneumoniae parC. The comparison of gyrA and parC sequences from S. pneumoniae strains with various levels of quinolone resistance allowed the identification of amino acid substitutions Ser-81 to Phe or Tyr in the GyrA subunit of DNA gyrase encoded by gyrA and amino acid changes Ser-79 to Phe in the ParC subunit of topoisomerase IV encoded by parC. These amino acid substitutions in the GyrA and ParC subunits occur in isolates with intermediate- or high-level quinolone resistance. Internal probes for the specific detection of each of the gyrA (SEQ ID NOs. 2042 and 2043) and parC (SEQ ID NO. 2046) mutations identified in quinolone-resistant S. pneumoniae were designed.

[0394] For all bacterial species, amplification was performed from purified genomic DNA. 1 μl of genomic DNA at 0.1 ng/μL was transferred directly to a 19 μl PCR mixture. Each PCR reaction contained 50 mM KCl, 10 mM Tris-HCl (pH 9.0), 0.1% Triton X-100, 2.5 mM MgCl₂, 0.4 μM (each) of the above primers SEQ ID NOs. 2040, 2041, 2044 and 2045, 0.05 mM bovine serum albumin (BSA) and 0.5 U Taq polymerase coupled with TaqStart™ antibody. The optimal cycling conditions for maximum sensitivity' and specificity were 3 minutes at 95° C. for initial denaturation, then forty cycles of two steps consisting of 1 second at 95° C. and 30 seconds at 58° C., followed by terminal extension at 72° C. for 2 minutes. In order to generate Digoxigenin (DIG)-labeled amplicons for capture probe hybridization, 0.1×PCR DIG labeling four deoxynucleoside triphosphates mix (Boehringer Mannheim GmbH) was used for amplification.

[0395] The DIG-labeled amplicons were hybridized to the capture probes bound to 96-well plates. The plates were incubated with anti-DIG-alkaline phosphatase and the chemiluminescence was measured by using a luminometer (MLX, Dynex Technologies Inc.) after incubation with CSPD and recorded as Relative Light Unit (RLU). The RLU ratio of tested sample with and without captures probes was then calculated. A ratio 2.0 was defined as a positive hybridization signal. All reactions were performed in duplicate.

[0396] The specificity of the multiplex assay with 40-cycle PCR was verified by using 0.1 ng of purified genomic DNA from a panel of bacteria listed in Table 13. Strong amplification of both gyrA and parC was detected only for the S. pneumoniae strains tested. Weak amplification of both gyrA and parC genes was detected for Staphylococcus simulans. The detection limit tested with purified genomic DNA from 5 strains of S. pneumoniae was 1 to 10 genome copies. In addition, 5 quinolone-resistant and 2 quinolone-sensitive clinical isolates of S. pneumoniae were tested to further validate the developed multiplex PCR coupled with capture probe hybridization assays. There was a perfect correlation between detection of S. pneumoniae gyrA and parC mutations and the susceptibility to quinolone.

[0397] The complete assay for the specific detection of S. pneumoniae and its susceptibility to quinolone contains the S. pneumoniae-specific primers (SEQ ID NOs. 1179 and 1181) described in Example 20 and the multiplex containing the S. pneumoniae gyrA-specific and parC-specific primer pairs (SEQ ID NOS. 2040 and 2041 and SEQ ID NOs. 2044 and 2045). Amplification is coupled with post-PCR hybridization with the internal probe specific to S. pneumoniae (SEQ ID NO. 1180) described in Example and the internal probes specific to each of the S. pneumoniae gyrA and parC variants (SEQ ID NOs. 2042, 2043 and 2046).

### Example 36

### Detection of Extended-Spectrum TEM-Type β-Lactamases in Escherichia coli

[0398] The analysis of TEM sequences which confer resistance to third-generation cephalosporins and to β-lactamase inhibitors allowed the identification of amino acid substitutions Met-69 to Ile or Leu or Val, Ser-130 to Gly, Arg-164 to Ser or His, Gly-238 to Ser, Glu-240 to Lys and Arg-244 to Ser or Cys or Thr or His or Leu. PCR primers SEQ ID NOs. 1907 and 1908 were designed to amplify TEM sequences. Internal probes for the specific detection of wild-type TEM (SEQ ID NO. 2141) and for each of the amino acid substitutions (SEQ ID NOs. 1909-1926) identified in TEM variants were designed to detect resistance to third-generation cephalosporins and to β-lactamase inhibitors. Design and synthesis of primers and probes, and detection of the hybridization were performed as described in Example 7.

[0399] For all bacterial species, amplification was performed from purified genomic DNA. One μl of genomic DNA at 0.1 ng/μl was transferred directly to a 19 μl PCR mixture. Each PCR reaction contained 50 mM KCl, 10 mM Tris-HCl (pH 9.0); 0.1% Triton X-100, 2.5 mM MgCl₂, 0.4 μM of the TEM-specific primers SEQ ID NOs. 1907 and 1908, 200 μM (each) of the four deoxynucleoside triphosphates, 0.05 mM bovine serum albumin (BSA) and 0.5 U Taq polymerase (Promega) coupled with TaqStart™ antibody. PCR amplification and agarose gel analysis of the amplified products were performed as described in Example 28. The optimal cycling conditions for maximum sensitivity and specificity were 3 minutes at 95° C. for initial denaturation, then forty cycles of three steps consisting of 5 seconds at 95° C., 30 seconds at 55° C. and 30 seconds at 72° C., followed by terminal extension at 72° C. for 2 minutes.

[0400] The specificity of the TEM-specific primers with 40-cycle PCR was verified by using 0.1 ng of purified genomic from the following bacteria: three third-generation cephalosporin-resistant Escherichia coli strains (one with TEM-10, one with TEM-28 and the other with TEM-49), two third-generation cephalosporin-sensitive Escherichia coli strain (one with TEM-1 and the other without TEM), one third-generation cephalosporin-resistant Klebsiella pneumoniae strain (with TEM-47), and one β-lactamase-inhibitor-resistant Proteus mirabilis strain (with TEM-39). Amplification with the TEM-specific primers was detected only for strains containing TEM.

[0401] The sensitivity of the assay with 40-cycle PCR was verified with three E. coli strains containing TEM-1 or TEM-10 or TEM-49, one K. pneumoniae strain containing TEM-47 and one P. mirabilis strain containing TEM-39. The detection limit was 5 to 100 copies of genomic DNA, depending on the TEM-containing strains tested.

[0402] The TEM-specific primers SEQ ID NOs. 1907 and 1908 were used in multiplex with the Escherichia coli/Shigella sp.-specific primers SEQ ID NOs. 1661 and 1665 described in Example 28 to allow the complete identification of Escherichia coli/Shigella sp. and the susceptibility to β-lactams. PCR amplification with 0.4 μM of each of the primers and agarose gel analysis of the amplified products was performed as described above.

[0403] The specificity of the multiplex with 40-cycle PCR was verified by using 0.1 ng of purified genomic DNA from the following bacteria: three third-generation cephalosporin-resistant Escherichia coli strains (one with TEM-10, one with TEM-28 and the other with TEM-49), two third-generation cephalosporin-sensitive Escherichia coli strain (one with TEM-1 and the other without TEM), one third-generation cephalosporin-resistant Klebsiella pneumoniae strain (with TEM-47), and one β-lactamase-inhibitor-resistant Proteus mirabilis strain (with TEM-39). The multiplex was highly specific to Escherichia coli strains containing TEM.

[0404] The complete assay for detection of TEM-type β-lactamases in E. coli includes PCR amplification using the multiplex containing the TEM-specific primers (SEQ ID NOs. 1907 and 1908) and the Escherichia coli/Shigella sp.-specific primers (SEQ ID NOs. 1661 and 1665) coupled with post PCR-hybridization with the internal probes specific to wild-type TEM (SEQ ID NO. 2141) and to the TEM variants (SEQ ID NOs. 1909-1926).

### Example 37

### Detection of Extended-Spectrum SHY-Type β-Lactamases in Klebsiella pneumoniae

[0405] The comparison of SHV sequences, which confer resistance to third-generation cephalosporins and to β-lactamase inhibitors, allowed the identification of amino acid substitutions Ser-130 to Gly, Asp-179 to Ala or Asn, Gly-238 to Ser, and Glu-240 to Lys. PCR primer pair SEQ ID NOs. 1884 and 1885 was designed to amplify SHV sequences. Internal probes for the specific identification of wild-type SHV (SEQ ID NO. 1896) and for each of the amino acid substitutions (SEQ ID NOs. 1886-1895 and 1897-1898) identified in SHV variants were designed to detect resistance to third-generation cephalosporins and to β-lactamase inhibitors. Design and synthesis of primers and probes, and detection of the hybridization were performed as described in Example 7.

[0406] For all bacterial species, amplification was performed from purified genomic DNA. One μl of genomic DNA at 0.1 ng/μl was transferred directly to a 19 μl PCR mixture. Each PCR reaction contained 50 mM KCl, 10 mM Tris-HCl (pH 9.0), 0.1% Triton X-100, 2.5 mM MgCl₂, 0.4 μM of the SHV-specific primers SEQ ID NO. 1884 and 1885, 200 μM (each) of the four deoxynucleoside triphosphates, 0.05 mM bovine serum albumin (BSA) and 0.5 U Taq polymerase (Promega) coupled with TaqStart™ antibody. PCR amplification and agarose gel analysis of the amplified products were performed as described in Example 28. The optimal cycling conditions for maximum sensitivity and specificity were 3 minutes at 95° C. for initial denaturation, then forty cycles of three steps consisting of 5 seconds at 95° C., 30 seconds at 55° C. and 30 seconds at 72° C., followed by terminal extension at 72° C. for 2 minutes.

[0407] The specificity of the SHV-specific primers with 40-cycle PCR was verified by using 0.1 ng of purified genomic from the following bacteria: two third-generation cephalosporin-resistant Klebsiella pneumoniae strains (one with SHV-2a and the other with SHV-12), one third-generation cephalosporin-sensitive Klebsiella pneumoniae strain (with SHV-1), two third-generation cephalosporin-resistant Escherichia coli strains (one with SHV-8 and the other with SHV-7), and two third-generation cephalosporin-sensitive Escherichia coli strains (one with SHV-1 and the other without any SHV). Amplification with the SHV-specific primers was detected only for strains containing SHV.

[0408] The sensitivity of the assay with 40-cycle PCR was verified with four strains containing SHV. The detection limit was 10 to 100 copies of genomic DNA, depending on the SHV-containing strains tested.

[0409] The amplification was coupled with post-PCR hybridization with the internal probes specific for identification of wild-type SHV (SEQ ID NO. 1896) and for each of the amino acid substitutions (SEQ ID NOs. 1886-1895 and 1897-1898) identified in SHV variants. The specificity of the probes was verified with six strains containing various SHV enzymes, one Klebsiella pneumoniae strain containing SHV-1, one Klebsiella pneumoniae strain containing SHV-2a, one Klebsiella pneumoniae strain containing SHV-12, one Escherichia coli strain containing SHV-1, one Escherichia coli strain containing SHV-7 and one Escherichia coli strain containing SHV-8. The probes correctly detected each of the SHV genes and their specific mutations. There was a perfect correlation between the SHV genotype of the strains and the susceptibility to β-lactam antibiotics.

[0410] The SHV-specific primers SEQ ID NOs. 1884 and 1885 were used in multiplex with the K. pneumoniae-specific primers SEQ ID NOs. 1331 and 1332 described in Example 29 to allow the complete identification of K. pneumoniae and the susceptibility to β-lactams. PCR amplification with 0.4 μM of each of the primers and agarose gel analysis of the amplified products were performed as described above.

[0411] The specificity of the multiplex with 40-cycle PCR was verified by using 0.1 ng of purified genomic DNA from the following bacteria: three K. pneumoniae strains containing SHV-1, one Klebsiella pneumoniae strain containing SHV-2a, one Klebsiella pneumoniae strain containing SHV-12, one K. rhinoscleromatis strain containing SHV-1, one Escherichia coli strain without SHV. The multiplex was highly specific to Klebsiella pneumoniae strain containing SHV.

### Example 38

### Development of a PCR Assay for the Detection and Identification of Neisseria gonorrhoeae and its associated tetracycline resistance gene tetM

[0412] The analysis of publicly available tetM sequences revealed conserved regions allowing the design of PCR primers specific to tetM sequences. The PCR primer pair SEQ ID NOs. 1588 and 1589 was used in multiplex with the Neisseria gonorrhoeae-specific primers SEQ ID NOs. 551 and 552 described in Example 31. Sequence alignment analysis of tetM sequences revealed regions suitable for the design of an internal probe specific to tetM (SEQ ID NO. 2254). PCR amplification was carried out on PTC-200 thermocyclers (MJ Research) using 0.4 μM of each primer pair as described in Example 28. The optimal cycling conditions for maximum sensitivity and specificity were as follow: three minutes at 95° C. for initial denaturation, then forty cycles of two steps consisting of 1 second at 95° C. and 30 seconds at 60° C., followed by terminal extension at 72° C. for 2 minutes.

[0413] The specificity of the multiplex PCR assay with 40-cycle PCR was verified by using 0.1 ng of purified genomic DNA from the following bacteria: two tetracycline-resistant Escherichia coli strains (one containing the tetracycline-resistant gene tetB and the other containing the tetracycline-resistant gene tetC), one tetracycline-resistant Pseudomonas aeruginosa strain (containing the tetracycline-resistant gene tetA), nine tetracycline-resistant Neisseria gonorrhoeae strains, two tetracycline-sensitive Neisseria meningitidis strains, one tetracycline-sensitive Neisseria polysaccharea strain, one tetracycline-sensitive Neisseria sicca strain and one tetracycline-sensitive Neisseria subflava strain. Amplification with both the tetM-specific and Neisseria gonorrhoeae-specific primers was detected only for N. gonorrhoeae strains containing tetM. There was a weak amplification signal using Neisseria gonorrhoeae-specific primers for the following species: Neisseria sicca, Neisseria polysaccharea and Neisseria meningitidis. There was a perfect correlation between the tetM genotype and the tetracycline susceptibility pattern of the Neisseria gonorrhoeae strains tested. The internal probe specific to N. gonorrhoeae SEQ ID NO. 2166 described in Example 31 can discriminate Neisseria gonorrhoeae from the other Neisseria sp.

[0414] The sensitivity of the assay with 40-cycle PCR was verified with two tetracycline resistant strains of N. gonorrhoeae. The detection limit was 5 copies of genomic DNA for both strains.

### Example 39

### Development of a PCR Assay for the Detection and Identification of Shigella Sp. and their Associated Trimethoprim Resistance Gene dhfrIa

[0415] The analysis of publicly available dhfrIa and other dhfr sequences revealed regions allowing the design of PCR primers specific to dhfrIa sequences. The PCR primer pair (SEQ ID NOs. 1459 and 1460) was used in multiplex with the Escherichia coli/Shigella sp.-specific primers SEQ ID NOs. 1661 and 1665 described in Example 28. Sequence alignment analysis of dhfrIa sequences revealed regions suitable for the design of an internal probe specific to dhfrIa (SEQ ID NO. 2253). PCR amplification and agarose gel analysis of the amplified products were performed as described in Example 28 with an annealing temperature of 60° C. The specificity of the multiplex assay with 40-cycle PCR was verified by using 0.1 ng of purified genomic DNA from a panel of bacteria. The list included the following trimethoprim-sensitive strains, Salmonella typhimyurium, Salmonella typhi, Salmonella enteritidis, Tatumella ptyseos, Klebsiella pneumoniae, Enterobacter aerogenes, Citrobacter farmeri, Campylobacter jejuni, Serratia marcescens, Shigella dysenteriae, Shigella flexneri, Shigella sonnei, six trimethoprim-resistant Escherichia coli strains (containing dhfrIa or dhfrV or dhfrVII or dhfrXII or dhfrXIII or dhfrXV), four trimethoprim-resistant strains containing dhfrIa (Shigella sonnei, Shigella flexneri, Shigella dysenteriae and Escherichia coli). There was a perfect correlation between the dhfrIa genotype and the trimethoprim susceptibility pattern of the Escherichia coli and Shigella sp. strains tested. The dhfrIa primers were specific to the dhfrIa gene and did not amplify any of the other trimethoprim-resistant dhfr genes tested. The sensitivity of the multiplex assay with 40-cycle PCR was verified with three strains of trimethoprim-resistant strains of Shigella sp. The detection limit was 5 to 10 genome copies of DNA, depending on the Shigella sp. strains tested.

### Example 40

### Development of a PCR Assay for the Detection and Identification of Acinetobacter baumannii and its Associated Aminoglycoside Resistance Gene aph(3′)-VIa

[0416] The comparison of publicly available aph(3′)-VIa sequence revealed regions allowing the design of PCR primers specific to aph(3)-VIa. The PCR primer pair (SEQ ID NOs. 1404 and 1405) was used in multiplex with the Acinetobacter baumannii-specific primers SEQ ID NOs. 1692 and 1693 described in Example 30. Analysis of the aph(3)-VIa sequence revealed region suitable for the design of an internal probe specific to aph(3′)-VIa (SEQ ID NO. 2252). PCR amplification and agarose gel analysis of the amplified products were performed as described in Example 28. The specificity of the multiplex assay with 40-cycle PCR was verified by using 0.1 ng of purified genomic DNA from a panel of bacteria including: two aminoglycoside-resistant A. baumanni strains (containing aph(3)-VIa), one aminoglycoside-sensitive A. baumani strain, one of each of the following aminoglycoside-resistant bacteria, one Serratia marcescens strain containing the aminoglycoside-resistant gene aacC1, one Serratia marcescens strain containing the aminoglycoside-resistant gene aacC4, one Enterobacter cloacae strain containing the aminoglycoside-resistant gene aacC2, one Enterococcus faecalis containing the aminoglycoside-resistant gene aacA-aphD, one Pseudomonas aeruginosa strain containing the aminoglycoside-resistant gene aac6IIa and one of each of the following aminoglycoside-sensitive bacterial species, Acinetobacter anitratus, Acinetobacter lwoffi, Psychobbacter phenylpyruvian, Neisseria gonorrhoeae, Haemophilus haemolyticus, Haemophilus influenzae, Yersinia enterolitica, Proteus vulgaris, Eikenella corrodens, Escherichia coli. There was a perfect correlation between the aph(3′)-VIa genotype and the aminoglycoside susceptibility pattern of the A. baumannii strains tested. The aph(3)-VIa-specific primers were specific to the aph(3)-VIa gene and did not amplify any of the other aminoglycoside-resistant genes tested. The sensitivity of the multiplex assay with 40-cycle PCR was verified with two strains of aminoglycoside-resistant strains of A. baumannii. The detection limit was 5 genome copies of DNA for both A. baumannii strains tested.

### Example 41

### Specific Identification of Bacteroides fragilis Using atpD (V-Type) Sequences

[0417] The comparison of atpD (V-type) sequences from a variety of bacterial species allowed the selection of PCR primers for Bacteroides fragilis. The strategy used to design the PCR primers was based on the analysis of a multiple sequence alignment of various atpD sequences from B. fragilis, as well as atpD sequences from the related species B. dispar, bacterial genera and archaea, especially representatives with phylogenetically related atpD sequences. A careful analysis of this alignment allowed the selection of oligonucleotide sequences which are conserved within the target species but which discriminate sequences from other species, especially from closely related species B. dispar, thereby permitting the species-specific and ubiquitous detection and identification of the target bacterial species.

[0418] The chosen primer pair, SEQ ID NOs. 2134-2135, produces an amplification product of 231 bp. Standard PCR was carried out on PTC-200 thermocyclers (MJ Research Inc.) using 0.4 μM of each primers pair as described in Example 28. The optimal cycling conditions for maximum sensitivity and specificity were as follows: three minutes at 95° C. for initial denaturation, then forty cycles of two steps consisting of 1 second at 95° C. and 30 seconds at 60° C., followed by terminal extension at 72° C. for 2 minutes.

[0419] The format of this assay is not limited to the one described above. A person skilled in the art could adapt the assay for different formats such as PCR with real-time detection using molecular beacon probes. Molecular beacon probes designed to be used in this assay include, but are not limited to, SEQ ID NO. 2136 for the detection of the B. fragilis amplicon.

### Example 42

### Evidence for Horizontal Gene Transfer in the Evolution of the Elongation Factor Tu in Enterococci

### Overview

[0420] The elongation factor Tu, encoded by tuf genes, is a GTP binding protein that plays a central role in protein synthesis. One to three tuf genes per genome are present depending on the bacterial species. Most low G+C gram-positive bacteria carry only one tuf gene. We have designed degenerate PCR primers derived from consensus sequences of the tuf gene to amplify partial tuf sequences from 17 enterococcal species and other phylogenetically related species. The amplified DNA fragments were sequenced either by direct sequencing or by sequencing cloned inserts containing putative amplicons. Two different tuf genes (tufA and tufB) were found in 11 enterococcal species, including Enterococcus avium, E. casseliflavus, E. dispar, E. durans, E. faecium, E. gallinarum, E. hirae, E. malodoratus, E. mundtii, E. pseudoavium, and E. raffinosus. For the other six enterococcal species (E. cecorum, E. columbae, E. faecalis, E. sulfureus, E. saccharolyticus, and E. solitarius), only the tufA gene was present. Based on 16S rRNA gene sequence analysis, the 11 species having two tuf genes all share a common ancestor, while the six species having only one copy diverged from the enterococcal lineage before that common ancestor. The presence of one or two copies of the tuf gene in enterococci was confirmed by Southern hybridization. Phylogenetic analysis of tuf sequences demonstrated that the enterococcal tufA gene branches with the Bacillus, Listeria and Staphylococcus genera, while the enterococcal tufB gene clusters with the genera Streptococcus and Lactococcus. Primary structure, analysis showed that four amino acid residues within the sequenced regions are conserved and unique to the enterococcal tufB genes and the tuf genes of streptococci and L. lactis. The data suggest that an ancestral streptococcus or a streptococcus-related species may have horizontally transferred a tuf gene to the common ancestor of the 11 enterococcal species which now carry two tuf genes.

### Introduction

[0421] The elongation factor Tu (EF-Tu) is a GTP binding protein playing a central role in protein synthesis. It mediates the recognition and transport of aminoacyl-tRNAs and their positioning to the A-site of the ribosome. The highly conserved function and ubiquitous distribution render the elongation factor a valuable phylogenetic marker among eubacteria and even throughout the archaebacterial and eukaryotic kingdoms. The tuf genes encoding elongation factor Tu are present in various copy numbers per bacterial genome. Most gram-negative bacteria contain two tuf genes. As found in Escherichia coli, the two genes, while being almost identical in sequence, are located in different parts of the bacterial chromosome. However, recently completed microbial genomes revealed that only one tuf gene is found in Helicobacter pylori as well as in some obligate parasitic bacteria, such as Borrelia burgdorferi, Rickettsia prowazekii, and Treponema pallidum, and in some cyanobacteria. In most gram-positive bacteria studied so far, only one tuf gene was found. However, Southern hybridization showed that there are two tuf genes in some clostridia as well as in Streptomyces coelicolor and S. lividans. Up to three tuf-like genes have been identified in S. ramocissimus.

[0422] Although massive prokaryotic gene transfer is suggested to be one of the factors responsible for the evolution of bacterial genomes, the genes encoding components of the translation machinery are thought to be highly conserved and difficult to be transferred horizontally due to the complexity of their interactions. However, a few recent studies demonstrated evidence that horizontal gene transfer has also occurred in the evolution of some genes coding for the translation apparatus, namely, 16S rRNA and some aminoacyl-tRNA synthetases. No further data suggest that such a mechanism is involved in the evolution of the elongation factors. Previous studies concluded that the two copies of tuf genes in the genomes of some bacteria resulted from an ancient event of gene duplication. Moreover, a study of the tuf gene in R. prowazekii suggested that intrachromosomal recombination has taken place in the evolution of the genome of this organism.

[0423] To date, little is known about the tuf genes of enterococcal species. In this study, we analyzed partial sequences of tuf genes in 17 enterococcal species, namely, E. avium, E. casseliflavus, E. cecorum, E. columbae, E. dispar, E. durans, E. faecalis, E. faecium, E. gallinarum, E. hirae, E. malodoratus, E. mundtii, E. pseudoavium, E. raffinosus, E. saccharolyticus, E. solitarius, and E. sulfureus. We report here the presence of two divergent copies of tuf genes in 11 of these enterococcal species. The 6 other species carried a single tuf gene. The evolutionary implications are discussed.

### Materials and Methods

[0424] Bacterial strains. Seventeen enterococcal strains and other gram-positive bacterial strains obtained from the American Type Culture Collection (ATCC, Manassas, Va.) were used in this study (Table 16). All strains were grown on sheep blood agar or in brain-heart infusion broth prior to DNA isolation.

[0425] DNA isolation. Bacterial DNAs were prepared using the G NOME DNA extraction kit (Bio101, Vista, Calif.) as previously described.

[0426] Sequencing of putative tuf genes. In order to obtain the tuf gene sequences of enterococci and other gram-positive bacteria, two sequencing approaches were used: 1) sequencing of cloned PCR products and 2) direct sequencing of PCR products. A pair of degenerate primers (SEQ ID NOs. 664 and 697) were used to amplify an 886-bp portion of the tuf genes from enterococcal species and other gram-positive bacteria as previously described. For E. avium, E. casseliflavus, E. dispar, E. durans, E. faecium, E. gallinarum, E. hirae, E. mundtii, E. pseudoavium, and E. raffinosus, the amplicons were cloned using the Original TA cloning kit (Invitrogen, Carlsbad, Calif.) as previously described. Five clones for each species were selected for sequencing. For E. cecorum, E. faecalis, E. saccharolyticus, and E. solitarius as well as the other gram-positive bacteria, the sequences of the 886-bp amplicons were obtained by direct sequencing. Based on the results obtained from the earlier rounds of sequencing, two pairs of primers were designed for obtaining the partial tuf sequences from the other enterococcal species by direct sequencing. One pair of primers (SEQ ID NOs. 543 and 660) were used to amplify the enterococcal tuf gene fragments from E. columbae, E. malodoratus, and E. sulfureus. Another pair of primers (SEQ ID NOs. 664 and 661) were used to amplify the second tuf gene fragments from E. avium, E. malodoratus, and E. pseudoavium.

[0427] Prior to direct sequencing, PCR products were electrophoresed on 1% agarose gel at 120V for 2 hours. The gel was then stained with 0.02% methylene blue for 30 minutes and washed twice with autoclaved distilled water for 15 minutes. The gel slices containing PCR products of the expected sizes were cut out and purified with the QIAquick gel extraction kit (QIAgen Inc., Mississauga, Ontario, Canada) according to the manufacturer's instructions. PCR mixtures for sequencing were prepared as described previously. DNA sequencing was carried out with the Big Dye™ Terminator Ready Reaction cycle sequencing kit using a 377 DNA sequencer (PE Applied Biosystems, Foster City, Calif.). Both strands of the amplified DNA were sequenced. The sequence data were verified using the Sequencer™ 3.0 software (Gene Codes Corp., Ann Arbor, Mich.).

[0428] Sequence analysis and phylogenetic study. Nucleotide sequences of the tuf genes and their respective flanking regions for E. faecalis, Staphylococcus aureus, and Streptococcus pneumoniae, were retrieved from the TIGR microbial genome database and S. pyogenes from the University of Oklahoma database. DNA sequences and deduced protein sequences obtained in this study were compared with those in all publicly available databases using the BLAST and FASTA programs. Unless specified, sequence analysis was conducted with the programs from GCG package (Version 10; Genetics Computer Group, Madison, Wis.). Sequence alignment of the tuf genes from 74 species representing all three kingdoms of life (Tables 16 and 17) were carried out by use of Pileup and corrected upon visual analysis. The N- and C-termini extremities of the sequences were trimmed to yield a common block of 201 amino acids sequences and equivocal residues were removed. Phylogenetic analysis was performed with the aid of PAUP 4.0b4 written by Dr. David L. Swofford (Sinauer Associates, Inc., Publishers, Sunderland, Mass.). The distance matrix and maximum parsimony were used to generate phylogenetic trees and bootstrap resampling procedures were performed using 500 and 100 replications in each analysis, respectively.

[0429] Protein structure analysis. The crystal structures of (i)Thermus aquaticus EF-Tu in complex with Phe-tRNA^{Phe} and a GTP analog and (ii) E. coli EF-Tu in complex with GDP served as templates for constructing the equivalent models for enterococcal EF-Tu. Homology modeling of protein structure was performed using the SWISS-MODEL server and inspected using the SWISS-PDB viewer version 3.1.

[0430] Southern hybridization. In a previous study, we amplified and cloned an 803-bp PCR product of the tuf gene fragment from E. faecium. Two divergent sequences of the inserts, which we assumed to be tufA and tufB genes, were obtained. The recombinant plasmid carrying either tufA or tufB sequence was used to generate two probes labeled with Digoxigenin (DIG)-11-dUTP by PCR incorporation following the instructions of the manufacturer (Boehringer Mannheim, Laval, Québec, Canada). Enterococcal genomic DNA samples (1-2 μg) were digested to completion with restriction endonucleases BglII and XbaI as recommended by the supplier (Amersham Pharmacia Biotech, Mississauga, Ontario, Canada). These restriction enzymes were chosen because no restriction sites were observed within the amplified tuf gene fragments of most enterococci. Southern blotting and filter hybridization were performed using positively charged nylon membranes (Boehringer Mannheim) and QuikHyb hybridization solution (Stratagene Cloning Systems, La Jolla, Calif.) according to the manufacturers' instructions with modifications. Twenty μl of each digestion were electrophoresed for 2 h at 120V on a 0.8% agarose gel. The DNA fragments were denatured with 0.5 M NaOH and transferred by Southern blotting onto a positively charged nylon membrane (Boehringer Mannheim). The filters were pre-hybridized for 15 min and then hybridized for 2 h in the QuikHyb solution at 68° C. with either DIG-labeled probe. Posthybridization washings were performed twice with 0.5×SSC, 1% SDS at room temperature for 15 min and twice in the same solution at 60° C. for 15 min. Detection of bound probes was achieved using disodium 3-(4-methoxyspiro(1,2-dioxetane-3,2′-(5′-chloro) tricyclo(3,3.1.1^{3.7}) decan)-4-yl) phenyl phosphate (CSPD) (Boehringer Mannheim) as specified by the manufacturer.

[0431] GenBank submission. The GenBank accession numbers for partial tuf gene sequences generated in this study are given in Table 16.

### Results

[0432] Sequencing and nucleotide sequence analysis. In this study, all gram-positive bacteria other than enterococci yielded a single tuf sequence of 886 by using primers SEQ ID NOs. 664 and 697 (Table 16). Each of four enterococcal species including E. cecorum, E. faecalis, E. saccharolyticus, and E. solitarius also yielded one 886-bp tuf sequence. On the other hand, for E. avium, E. casseliflavus, E. dispar, E. durans, E. faecium, E. gallinarum, E. hirae, E. mundtii, E. pseudoavium, and E. raffinosus, direct sequencing of the 886-bp fragments revealed overlapping peaks according to their sequence chromatograms, suggesting the presence of additional copies of the tuf gene. Therefore, the tuf gene fragments of these 10 species were cloned first and then sequenced. Sequencing data revealed that two different types of tuf sequences (tufA and tufB) are found in eight of these species including E. casseliflavus, E. dispar, E. durans, E. faecium, E. gallinarum, E. hirae, E. mundtii, and E. raffinosus. Five clones from E. avium and E. pseudoavium yielded only a single tuf sequence. These new sequence data allowed the design of new primers specific for the enterococcal tufA or tufB sequences. Primers SEQ ID NOs. 543 and 660 were designed to amplify only enterococcal tufA sequences and a 694-bp fragment was amplified from all 17 enterococcal species. The 694-bp sequences of tufA genes from E. columbae, E. malodoratus, and E. sulfureus were obtained by direct sequencing using these primers. Primers SEQ ID NOs. 664 and 661 were designed for the amplification of 730-bp portion of tufB genes and yielded the expected fragments from 11 enterococcal species, including E. malodoratus and the 10 enterococcal species in which heterogeneous tuf sequences were initially found. The sequences of the tufB fragments for E. avium, E. malodoratus and E. pseudoavium were determined by direct sequencing using the primers SEQ ID NOs. 664 and 661. Overall, tufA gene fragments were obtained from all 17 enterococcal species but tufB gene fragments were obtained with only 11 enterococcal species (Table 16).

[0433] The identities between tufA and tufB for each enterococcal species were 68-79% at the nucleotide level and 81 to 89% at the amino acid level. The tufA gene is highly conserved among all enterococcal species with identities varying from 87% to 99% for DNA and 93% to 99% for amino acid sequences, while the identities among tufB genes of enterococci varies from 77% to 92% for DNA and 91% to 99% for amino acid sequences, indicating their different origins and evolution (Table 18). Since E. solitarius has been transferred to the genus Tetragenococcus, which is also a low G+C gram-positive bacterium, our sequence comparison did not include this species as an enterococcus. G+C content of enterococcal tufA sequences ranged from 40.8% to 43.1%, while that of enterococcal tufB sequences varied from 37.8% to 46.3%. Based on amino acid sequence comparison, the enterococcal tufA gene products share higher identities with those of Abiotrophia adiacens, Bacillus subtilis, Listeria monocytogenes, S. aureus, and S. epidermidis. On the other hand, the enterococcal tufB gene products share higher percentages of amino acid identity with the tuf genes of S. pneumoniae, S. pyogenes and Lactococcus lactis (Table 18).

[0434] In order to elucidate whether the two enterococcal tuf sequences encode genuine EF-Tu, the deduced amino acid sequences of both genes were aligned with other EF-Tu sequences available in SWISSPROT (Release 38). Sequence alignment demonstrated that both gene products are highly conserved and carry all conserved residues present in this portion of prokaryotic EF-Tu (FIG. 4). Therefore, it appears that both gene products could fulfill the function of EF-Tu. The partial tuf gene sequences encode the portion of EF-Tu from residues 117 to 317, numbered as in E. coli. This portion makes up of the last four α-helices and two β-strands of domain I, the entire domain II and the N-terminal part of domain III on the basis of the determined structures of E. coli EF-Tu.

[0435] Based on the deduced amino acid sequences, the enterococcal tufB genes have unique conserved residues Lys129, Leu140, Ser230, and Asp234 (E. coli numbering) that are also conserved in streptococci and L. lactis, but not in the other bacteria (FIG. 4). All these residues are located in loops except for Ser230. In other bacteria the residue Ser230 is substituted for highly conserved Thr, which is the 5^{th} residue of the third β-strand of domain II. This region is partially responsible for the interaction between the EF-Tu and aminoacyl-tRNA by the formation of a deep pocket for any of the 20 naturally occurring amino acids. According to our three-dimensional model (data not illustrated), the substitution Thr230→Ser in domain II of EF-Tu may have little impact on the capability of the pocket to accommodate any amino acid. However, the high conservation of Thr230 comparing to the unique Ser substitution found only. in streptococci and 11 enterococci could suggest a subtle functional role for this residue.

[0436] The tuf gene sequences obtained for E. faecalis, S. aureus, S. pneumoniae and S. pyogenes were compared with their respective incomplete genome sequence. Contigs with more than 99% identity were identified. Analysis of the E. faecalis genome data revealed that the single E. faecalis tuf gene is located within an str operon where tuf is preceded by fus that encodes the elongation factor G. This str operon is present in S. aureus and B. subtilis but not in the two streptococcal genomes examined. The 700-bp or so sequence upstream the S. pneumoniae tuf gene has no homology with any known gene sequences. In S. pyogenes, the gene upstream of tuf is similar to a cell division gene, ftsW, suggesting that the tuf genes in streptococci are not arranged in a str operon.

[0437] Phylogenetic analysis. Phylogenetic analysis of the tuf amino acid sequences with representatives of eubacteria, archeabacteria, and eukaryotes using neighbor-joining and maximum parsimony methods showed three major clusters representing the three kingdoms of life. Both methods gave similar topologies consistent with the rRNA gene data (data not shown). Within the bacterial clade, the tree is polyphyletic but tufA genes from all enterococcal species always clustered with those from other low G+C gram-positive bacteria (except for streptococci and lactococci), while the tufB genes of the 11 enterococcal species form a distinct cluster with streptococci and L. lactis (FIG. 5). Duplicated genes from the same organism do not cluster together, thereby not suggesting evolution by recent gene duplication.

[0438] Southern hybridization. Southern hybridization of BglII/XbaI digested genomic DNA from 12 enterococcal species tested with the tufA probe (DIG-labeled tufA fragment from E. faecium) yielded two bands of different sizes in 9 species, which also carried two divergent tuf sequences according to their sequencing data. For E. faecalis and E. solitarius, a single band was observed indicating that one tuf gene is present (FIG. 6). A single band was also found when digested genomic DNA from S. aureus, S. pneumoniae, and S. pyogenes were hybridized with the tufA probe (data not shown). For E. faecium, the presence of three bands can be explained by the existence of a XbaI restriction site in the middle of the tufA sequence, which was confirmed by sequencing data. Hybridization with the tufB probe (DIG-labeled tufB fragment of E. faecium) showed a banding profile similar to the one obtained with the tufA probe (data not shown).

### Discussion

[0439] In this study, we have shown that two divergent copies of genes encoding the elongation factor Tu are present in some enterococcal species. Sequence data revealed that both genes are highly conserved at the amino acid level. One copy (tufA) is present in all enterococcal species, while the other (tufB) is present only in 11 of the 17 enterococcal species studied. Based on 16S rRNA sequence analysis, these 11 species are members of three different enterococcal subgroups (E. avium, E. faecium, and E. gallinarum species groups) and a distinct species (E. dispar). Moreover, 16S rDNA phylogeny suggests that these 11 species possessing 2 tuf genes all share a common ancestor before they further evolved to become the modern species. Since the six other species having only one copy diverged from the enterococcal lineage before that common ancestor, it appears that the presence of one tuf gene in these six species is not attributable to gene loss.

[0440] Two clusters of low G+C gram-positive bacteria were observed in the phylogenetic tree of the tuf genes: one contains a majority of low G+C gram-positive bacteria and the other contains lactococci and streptococci. This is similar to the finding on the basis of phylogenetic analysis of the 16S rRNA gene and the hrcA gene coding for a unique heat-shock regulatory protein. The enterococcal tufA genes branched with most of the low G+C gram-positive bacteria, suggesting that they originated from a common ancestor. On the other hand, the enterococcal tufB genes branched with the genera Streptococcus and Lactococcus that form a distinct lineage separated from other low G+C gram-positive bacteria (FIG. 5). The finding that these EF-Tu proteins share some conserved amino acid residues unique to this branch also supports the idea that they may share a common ancestor. Although these conserved residues might result from convergent evolution upon a specialized function, such convergence at the sequence level, even for a few residues, seems to be rare, making it an unlikely event. Moreover, no currently known selective pressure, if any, would account for keeping one versus two tuf genes in bacteria. The G+C contents of enterococcal tufA and tufB sequences are similar, indicating that they both originated from low G+C gram-positive bacteria, in accordance with the phylogenetic analysis.

[0441] The tuf genes are present in various copy numbers in different bacteria. Furthermore, the two tuf genes are normally associated with characteristic flanking genes. The two tuf gene copies commonly encountered within gram-negative bacteria are part of the bacterial str operon and tRNA-tufB operon, respectively. The arrangement of tufA in the str operon was also found in a variety of bacteria, including Thermotoga maritima, the most ancient bacteria sequenced so far, Aquifex aeolicus, cyanobacteria, Bacillus sp., Micrococcus luteus, Mycobacterium tuberculosis, and Streptomyces sp. Furthermore, the tRNA-tufB operon has also been identified in Aquifex aeolicus, Thermus thermophilus, and Chlamydia trachomatis. The two widespread tuf gene arrangements argue in favor of their ancient origins. It is noteworthy that most obligate intracellular parasites, such as Mycoplasma sp., R. prowazekii, B. burgdorferi, and T. pallidum, contain only one tuf gene. Their flanking sequences are distinct from the two conserved patterns as a result of selection for effective propagation by an extensive reduction in genome size by intragenomic recombination and rearrangement.

[0442] Most gram-positive bacteria with low G+C content sequenced to date contain only a single copy of the tuf gene as a part of the str operon. This is the case for B. subtilis, S. aureus and E. faecalis. PCR amplification using a primer targeting a conserved region of the fus gene and the tufA-specific primer SEQ ID NO. 660, but not the tufB-specific primer SEQ ID NO. 661, yielded the expected amplicons for all 17 enterococcal species tested, indicating the presence of the fus-tuf organization in all enterococci (data not shown). However, in the genomes of S. pneumoniae and S. pyogenes, the sequences flanking the tuf genes varies although the tuf gene itself remains highly conserved. The enterococcal tufB genes are clustered with streptococci, but at present we do not have enough data to identify the genes flanking the enterococcal tufB genes. Furthermore, the functional role of the enterococcal tufB genes remains unknown. One can only postulate that the two divergent gene copies are expressed under different conditions.

[0443] The amino acid sequence identities between the enterococcal tufA and tufB genes are lower than either i) those between the enterococcal tufA and the tuf genes from other low G+C gram-positive bacteria (streptococci and lactococci excluded) or ii) those between the enterococcal tufB and streptococcal and lactococcal tuf genes. These findings suggest that the enterococcal tufA genes share a common ancestor with other low G+C gram-positive bacteria via the simple scheme of vertical evolution, while the enterococcal tufB genes are more closely related to those of streptococci and lactococci. The facts that some enterococci possess an additional tuf gene and that the single streptococcal tuf gene is nut clustered with other low G+C gram-positive bacteria cannot be explained by the mechanism of gene duplication or intrachromosomal recombination. According to sequence and phylogenetic analysis, we propose that the presence of the additional copy of the tuf genes in 11 enterococcal species is due to horizontal gene transfer. The common ancestor of the 11 enterococcal species now carrying tufB genes acquired a tuf gene from an ancestral streptococcus or a streptococcus-related species during enterococcal evolution through gene transfer before the diversification of modern enterococci. Further study of the flanking regions of the gene may provide more clues for the origin and function of this gene in enterococci.

[0444] Recent studies of genes and genomes have demonstrated that considerable horizontal transfer occurred in the evolution of aminoacyl-tRNA synthetases in all three kingdoms of life. The heterogeneity of 16S rRNA is also attributable to horizontal gene transfer in some bacteria, such as Streptomyces, Thermomonospora chromogena and Mycobacterium celatum. In this study, we provide the first example in support of a likely horizontal transfer of the tuf gene encoding the elongation factor Tu. This may be an exception since stringent functional constraints do not allow for frequent horizontal transfer of the tuf gene as with other genes. However, enterococcal tuf genes should not be the only such exception as we have noticed that the phylogeny of Streptomyces tuf genes is equally or more complex than that of enterococci. For example, the three tuf-like genes in a high G+C gram-positive bacterium, S. ramocissimus, branched with the tuf genes of phylogenetically divergent groups of bacteria (FIG. 5). Another example may be the tuf genes in clostridia, which represent a phylogenetically very broad range of organisms and form a plethora of lines and groups of various complexities and depths. Four species belonging to three different clusters within the genus Clostridium have been shown by Southern hybridization to carry two copies of the tuf gene. Further sequence data and phylogenetic analysis may help interpreting the evolution of the elongation factor Tu in these gram-positive bacteria. Since the tuf genes and 16S rRNA genes are often used for phylogenetic study, the existence of duplicate genes originating from horizontal gene transfer may alter the phylogeny of microorganisms when the laterally acquired copy of the gene is used for such analysis. Hence, caution should be taken in interpreting phylogenetic data. In addition, the two tuf genes in enterococci have evolved separately and are distantly related to each other phylogenetically. The enterococcal tufB genes are less conserved and unique to the 11 enterococcal species only. We previously demonstrated that the enterococcal tufA genes could serve as a target to develop a DNA-based assay for identification of enterococci. The enterococcal tufB genes would also be useful in identification of these 11 enterococcal species.

### Example 43

### Elongation Factor Tu (tuf) and the F-ATPase Beta-Subunit (atpD) as Phylogenetic Tools for Species of the Family Enterobacteriaceae

### Summary

[0445] The phylogeny of enterobacterial species commonly found in clinical samples was analyzed by comparing partial sequences of their elongation factor Tu (tuf) genes and their F-ATPase beta-subunit (atpD) genes. A 884-bp fragment for tuf and a 884- or 871-bp fragment for atpD were sequenced for 88 strains of 72 species from 25 enterobacterial genera. The atpD sequence analysis revealed a specific indel to Pantoea and Tatumella species showing for the first time a tight phylogenetic affiliation between these two genera. Comprehensive tuf and atpD phylogenetic trees were constructed and are in agreement with each other. Monophyletic genera are Yersinia, Pantoea, Edwardsiella, Cedecea, Salmonella, Serratia, Proteus, and Providencia. Analogous trees were obtained based on available 16S rDNA sequences from databases. tuf and atpD phylogenies are in agreement with the 16S rDNA analysis despite the smaller resolution power for the latter. In fact, distance comparisons revealed that tuf and atpD genes provide a better resolution for pairs of species belonging to the family Enterobacteriaceae. However, 16S rDNA distances are better resolved for pairs of species belonging to different families. In conclusion, tuf and atpD conserved genes are sufficiently divergent to discriminate different species inside the family Enterobacteriaceae and offer potential for the development of diagnostic tests based on DNA to identify enterobacterial species.

### Introduction

[0446] Members of the family Enterobacteriaceae are facultatively anaerobic gram-negative rods, catalase-positive and oxidase-positive (Brenner, 1984). They are found in soil, water, plants, and in animals from insects to man. Many enterobacteria are opportunistic pathogens. In fact, members of this family are responsible for about 50% of nosocomial infections in the United States (Brenner, 1984). Therefore, this family is of considerable clinical importance.

[0447] Major classification studies on the family Enterobacteriaceae are based on phenotypic traits (Brenner et al., 1999; Brenner et al., 1980; Dickey & Zumoff, 1988; Farmer III et al., 1980; Farmer III et al., 1985b; Farmer III et al., 1985a) such as biochemical reactions and physiological characteristics. However, phenotypically distinct strains may be closely related by genotypic criteria and may belong to the same genospecies (Bercovier et al., 1980; Hartl & Dykhuizen, 1984). Also, phenotypically close strains (biogroups) may belong to different genospecies, like Klebsiella pneumoniae and Enterobacter aerogenes (Brenner, 1984) for example. Consequently, identification and classification of certain species may be ambiguous with techniques based on phenotypic tests (Janda et al., 1999; Kitch et al., 1994; Sharma et al., 1990).

[0448] More advances in the classification of members of the family Enterobacteriaceae have come from DNA-DNA hybridization studies (Brenner et al., 1993; Brenner et al., 1986; Brenner, et al., 1980; Farmer III, et al., 1980; Farmer III, et al., 1985b; Izard et al., 1981; Steigerwalt et al., 1976). Furthermore, the phylogenetic significance of bacterial classification based on 16S rDNA sequences has been recognized by many workers (Stackebrandt & Goebel, 1994; Wayne et al., 1987). However, members of the family Enterobacteriaceae have not been subjected to extensive phylogenetic analysis of 16S rDNA (Sproer et al., 1999). In fact, this molecule was not thought to solve taxonomic problems concerning closely related species because of its very high degree of conservation (Brenner, 1992; Sproer, et al., 1999). Another drawback of the 16S rDNA gene is that it is found in several copies within the genome (seven in Escherichia coli and Salmonella typhimurium) (Hill & Harnish, 1981). Due to sequence divergence between the gene copies, direct sequencing of PCR products is often not suitable to achieve a representative sequence (Cilia et al., 1996; Hill & Harnish, 1981). Other genes such as gap and ompA (Lawrence et al., 1991), rpoB (Mollet et al., 1997), and infB (Hedegaard et al., 1999) were used to resolve the phylogeny of enterobacteria. However, none of these studies covered an extensive number of species.

[0449] tuf and atpD are the genes encoding the elongation factor Tu (EF-Tu) and the F-ATPase beta-subunit, respectively. EF-Tu is involved in peptide chain formation (Ludwig et al., 1990). The two copies of the tuf gene (tufA and tufB) found in enterobacteria (Sela et al., 1989) share high identity level (99%) in Salmonella typhimurium and in E. coli. The recombination phenomenon could explain sequence homogenization between the two copies (Abdulkarim & Hughes, 1996; Grunberg-Manago, 1996). F-ATPase is present on the plasma membranes of eubacteria (Nelson & Taiz, 1989). It functions mainly in ATP synthesis (Nelson & Taiz, 1989) and the beta-subunit contains the catalytic site of the enzyme. EF-Tu and F-ATPase are highly conserved throughout evolution and shows functional constancy (Amann et al., 1988; Ludwig, et al., 1990). Recently, phylogenies based on protein sequences from EF-Tu and F-ATPase beta-subunit showed good agreement with each other and with the rDNA data (Ludwig et al., 1993).

[0450] We elected to sequence 884-bp fragments of tuf and atpD from 88 clinically relevant enterobacterial strains representing 72 species from 25 genera. These sequences were used to create phylogenetic trees that were compared with 16S rDNA trees. These trees revealed good agreement with each others and demonstrated the high resolution of tuf and atpD phylogenies at the species level.

### Materials and Methods

[0451] Bacterial strains and genomic material. All bacterial strains used in this study were obtained from the American Type Culture Collection (ATCC) or the Deutsche Sammlung von Mikroorganismen and Zellkulturen GmbH (DSMZ). These enterobacteria can all be recovered from clinical specimens, but not all are pathogens. Whenever possible, we choose type strains. Identification of all strains was confirmed by classical biochemical tests using the automated system MicroScan WalkAway-96 system equipped with a Negative BP Combo Panel Type 15 (Dade Behring Canada). Genomic DNA was purified using the G NOME DNA kit (Bio 101). Genomic DNA from Yersinia pestis was kindly provided by Dr. Robert R. Brubaker. Strains used in this study and their descriptions are shown in Table 19.

[0452] PCR primers. The eubacterial tuf and atpD gene sequences available from public databases were analyzed using the GCG package (version 8.0) (Genetics Computer Group). Based on multiple sequence alignments, two highly conserved regions were chosen for each genes, and PCR primers were derived from these regions with the help of Oligo primer analysis software (version 5.0) (National Biosciences). A second 5′ primer was design to amplify the gene atpD for few enterobacteria difficult to amplify with the first primer set. When required, the primers contained inosines or degeneracies to account for variable positions. Oligonucleotide primers were synthesized with a model 394 DNA/RNA synthesizer (PE Applied Biosystems). PCR primers used in this study are listed in Table 20.

[0453] DNA sequencing. An 884-bp portion of the tuf gene and an 884-bp portion (or alternatively an 871-bp portion for a few enterobacterial strains) of the atpD gene were sequenced for all enterobacteria listed in the first strain column of Table 19. Amplification was performed with 4 ng of genomic DNA. The 40-μl PCR mixtures used to generate PCR products for sequencing contained 1.0 μM each primer, 200 μM each deoxyribonucleoside triphosphate (Pharmacia Biotech), 10 mM Tris-HCl (pH 9.0 at 25° C.), 50 mM KCl, 0.1% (w/v) Triton X-100, 2.5 mM MgCl₂, 0.05 mM BSA, 0.3 U of Taq DNA polymerase (Promega) coupled with TaqStart™ antibody (Clontech Laboratories). The TaqStart™ neutralizing monoclonal antibody for Taq DNA polymerase was added to all PCR mixtures to enhance efficiency of amplification (Kellogg et al., 1994). The PCR mixtures were subjected to thermal cycling (3 min at 95° C. and then 35 cycles of 1 min at 95° C., 1 min at 55° C. for tuf or 50° C. for atpD, and 1 min at 72° C., with a 7-min final extension at 72° C.) using a PTC-200 DNA Engine thermocycler (MJ Research). PCR products having the predicted sizes were recovered from an agarose gel stained for 15 min with 0.02% of methylene blue followed by washing in sterile distilled water for 15 min twice (Flores et al., 1992). Subsequently, PCR products having the predicted sizes were recovered from gels using the QIAquick gel extraction kit (QIAGEN).

[0454] Both strands of the purified amplicons were sequenced using the ABI Prism BigDye Terminator Cycle Sequencing Ready Reaction Kit (PE Applied Biosystems) on an automated DNA sequencer (Model 377). Amplicons from two independent PCR amplifications sequenced for each strain to ensure the absence of sequencing errors attributable to nucleotide miscorporations by the Taq DNA polymerase. Sequence assembly was performed with the aid of Sequencher 3.0 software (Gene Codes).

[0455] Phylogenetic analysis. Multiple sequence alignments were performed using PileUp from the GCG package (Version 10.0) (Genetics Computer Group) and checked by eye with the editor SeqLab to edit sequences if necessary and to note which regions were to be excluded for phylogenetic analysis. Vibrio cholerae and Shewanella putrefaciens were used as outgroups. Bootstrap subsets (750 sets) and phylogenetic trees were generated with the Neighbor Joining algorithm from Dr. David Swofford's PAUP (Phylogenetic Analysis Using Parsimony) Software version 4.0b4 (Sinauer Associates) and with tree-bisection branch-swapping. The distance model used was Kimura (1980) two-parameter. Relative rate test was performed with the aid of Phyltest program version 2.0 (c).

### Results and Discussion

### DNA Amplification, Sequencing And Sequence Alignments

[0456] A PCR product of the expected size of 884 by was obtained for tuf and of 884 or 871 by for atpD from all bacterial strains tested. After subtracting for biased primer regions and ambiguous single strand data, sequences of at least 721 by for tuf and 713 by for atpD were submitted to phylogenetic analyses. These sequences were aligned with tuf and atpD sequences available in databases to verify that the nucleotide sequences indeed encoded a part of tested genes. Gaps were excluded to perform phylogenetic analysis.

### Signature Sequences

[0457] From the sequence alignments obtained from both tested genes, only one insertion was observed. This five amino acids insertion is located between the positions 325 and 326 of atpD gene of E. coli strain K-12 (Saraste et al., 1981) and can be considered a signature sequence of Tatumella ptyseos and Pantoea species (FIG. 7). The presence of a conserved indel of defined length and sequence and flanked by conserved regions could suggest a common ancestor, particularly when members of a given taxa share this indel (Gupta, 1998). To our knowledge, high relatedness between the genera Tatumella and Pantoea is demonstrated for the first time.

[0458] Enterobacter agglomerans ATCC 27989 sequence does not possess the five amino acid indel (FIG. 7). This indel could represent a useful marker to help resolve the Enterobacter agglomerans and Pantoea classification. Indeed, the transfer of Enterobacter agglomerans to Pantoea agglomerans was proposed in 1989 by Gavini et al. (Gavini et al., 1989). However, some strains are provisionally classified as Pantoea sp. until their interrelatedness is elucidated (Gavini, et al., 1989). Since the transfer was proposed, the change of nomenclature has not yet been made for all Enterobacter agglomerans in the ATCC database. The absence of the five amino acids indel suggests that some strains of Enterobacter agglomerans most likely do not belong to the genus Pantoea.

### Phylogenetic Trees Based on Partial Tuf Sequences, Atpd Sequences, and Published 16S Rdna Data of Members of the Enterobacteriaceae.

[0459] Representative trees constructed from tuf and atpD sequences with the neighbor-joining method are shown in FIG. 8. The phylogenetic trees generated from partial tuf sequences and atpD sequences are very similar. Nevertheless, atpD tree shows more monophyletic groups corresponding to species that belong to the same genus. These groups are more consistent with the actual taxonomy. For both genes, some genera are not monophyletic. These results support previous phylogenies based on the genes gap and ompA (Lawrence, et al., 1991), rpoB (Mollet, et al., 1997), and infB (Hedegaard, et al., 1999) which all showed that the genera Escherichia and Klebsiella are polyphyletic. There were few differences in branching between tuf and atpD genes.

[0460] Even though Pantoea agglomerans and Pantoea dispersa indels were excluded for phylogenetic analysis, these two species grouped together and were distant from Enterobacter agglomerans ATCC 27989, adding another evidence that the latter species is heterogenous and that not all members of this species belong to the genus Pantoea. In fact, the E. agglomerans strain ATCC 27989 exhibits branch lengths similar to others Enterobacter species with both genes. Therefore, we suggest that this strain belong to the genus Enterobacter until further reclassification of that genus.

[0461] tuf and atpD trees exhibit very short genetic distances between taxa belonging to the same genetic species including species segregated for clinical considerations. This first concern E. coli and Shigella species that were confirmed to be the same genetic species by hybridization studies (Brenner et al., 1972; Brenner et al., 1972; Brenner et al., 1982) and phylogenies based on 16S rDNA (Wang et al., 1997) and rpoB genes (Mollet, et al., 1997). Hybridization studies (Bercovier, et al., 1980) and phylogeny based on 16S rDNA genes (Ibrahim et al., 1994) demonstrated also that Yersinia pestis and Y. pseudotuberculosis are the same genetic species. Among Yersinia pestis and Y. pseudotuberculosis, the three Klebsiella pneumoniae subspecies, E. coli-Shigella species, and Salmonella choleraesuis subspecies, Salmonella is a less tightly knit species than the other genetic species. The same is true for E. coli and Shigella species.

[0462] Escherichia fergusonii is very close to E. coli-Shigella genetic species. This observation is corroborated by 16S rDNA phylogeny (McLaughlin et al., 2000) but not by DNA hybridization values. In fact, E. fergusonii is only 49% to 63% related to E. coli-Shigella (Farmer III, et al., 1985b). It was previously observed that very recently diverged species may not be recognizable based on 16S rDNA sequences although DNA hybridization established them as different species (Fox et al., 1992). Therefore, E. fergusonii could be a new “quasi-species”.

[0463] atpD phylogeny revealed Salmonella subspecies divisions consistent with the actual taxonomy. This result was already observed by Christensen et al. (Christensen & Olsen, 1998). Nevertheless, tuf partial sequences discriminate less than atpD between Salmonella subspecies.

[0464] Overall, tuf and atpD phylogenies exhibit enough divergence between species to ensure efficient discrimination. Therefore, it could be easy to distinguish phenotypically close enterobacteria belonging to different genetic species such as Klebsiella pneumoniae and Enterobacter aerogenes.

[0465] Phylogenetic relationships between Salmonella, E. coli and C. freundii are not well defined. 16S rDNA and 23S rDNA sequence data reveals a closer relationship between Salmonella and E. coli than between Salmonella and C. freundii (Christensen et al., 1998), while DNA homology studies (Selander et al., 1996) and infB phylogeny (Hedegaard, et al., 1999) showed that Salmonella is more closely related to C. freundii than to E. coli. In that regard, tuf and atpD phylogenies are coherent with 16S rDNA and 23S rDNA sequence analysis.

[0466] Phylogenetic analyses were also performed using amino acids sequences. tuf tree based on amino acids is characterized by a better resolution between taxa outgroup and taxa ingroup (enterobacteria) than tree based on nucleic acids whereas atpD trees based on amino acids and nucleic acids give almost the same resolution between taxa outgroup and ingroup (data not shown).

[0467] Relative rate test (or two cluster test (Takezaki et al., 1995)) evaluates if evolution is constant between two taxa. Before to apply the test, the topology of a tree is determined by tree-building method without the assumption of rate constancy. Therefore, two taxa (or two groups of taxa) are compared with a third taxon that is an outgroup of the first two taxa (Takezaki, et al., 1995). Few pairs of taxa that exhibited a great difference between their branch lengths at particular nodes were chosen to perform the test. This test reveals that tuf and atpD are not constant in their evolution within the family Enterobacteriaceae. For tuf, for example, the hypothesis of rate constancy is rejected (Z value higher than 1.96) between Yersinia species. The same is true for Proteus species. For atpD, for example, evolution is not constant between Proteus species, between Proteus species and Providencia species, and between Yersinia species and Escherichia coli. For 16S rDNA, for example, evolution is not constant between two E. coli, between E. coli and Enterobacter aerogenes, and between E. coli and Proteus vulgaris. These results suggest that tuf, atpD and 16S rDNA could not serve as a molecular clock for the entire family Enterobacteriaceae.

[0468] Since the number and the nature of taxa can influence topology of trees, phylogenetic trees from tuf and atpD were reconstructed using sequences corresponding to strains for which 16S rDNA genes were published in GenEMBL. These trees were similar to those generated using 16S rDNA (FIG. 9). Nevertheless, 16S rDNA tree gave poorer resolution power than tuf and atpD gene trees. Indeed, these latter exhibited less multifurcation (polytomy) than the 16S rDNA tree.

Comparison of Distances Based on tuf, atpD, and 16S rDNA data.

[0469] tuf, atpD, and 16S rDNA distances (i.e. the number of differences per nucleotide site) were compared with each other for each pair of strains. We found that the tuf and atpD distances were respectively 2.268±0.965 and 2.927±0.896 times larger than 16S rDNA distances (FIGS. 10a and b). atpD distances were 1.445±0.570 times larger than tuf distances (FIG. 10c). FIG. 10 also shows that the tuf, atpD, and 16S rDNA distances between members of different species of the same genus (0.053±0.034, 0.060±0.020, and 0.024±0.010, respectively) were in mean smaller than the distances between members of different genera belonging to the same family (0.103±0.053, 0.129±0.051, and 0.044±0.013, respectively). However, the overlap exhibits with standard deviations add to a focus of evidences that some enterobacterial genera are not well defined (Brenner, 1984). In fact, many distances for pairs of species especially belonging to the genera Escherichia, Shigella, Enterobacter, Citrobacter, Klebsiella, and Kluyvera overlap distances for pairs of species belonging to the same genus (FIG. 10). For example, distances for pairs composed by species of Citrobacter and species of Klebsiella overlap distances for pairs composed by two Citrobacter or by two Klebsiella.

[0470] Observing the distance distributions, 16S rDNA distances reveal a clear separation between the families Enterobacteriaceae and Vibrionaceae despite the fact that the family Vibrionaceae is genetically very close to the Enterobacteriaceae (FIGS. 10a and b). Nevertheless, tuf and atpD show higher discriminating power below the family level (FIGS. 10a and b).

[0471] There were some discrepancies in the relative distances for the same pairs of taxa between the two genes studied. First, distances between Yersinia species are at least two times lower for atpD than for tuf (FIG. 10c). Also, distances at the family level (between Enterobacteriaceae and Vibrionaceae) show that Enterobacteriaceae is a tightlier knit family with atpD gene (Proteus genus excepted) than with tuf gene. Both genes well delineate taxa belonging to the same species. There is one exception with atpD: Klebsiella planticola and K. ornithinolithica belong to the same genus but fit with taxa belonging to the same species (FIGS. 10a and c). These two species are also very close genotypically with tuf gene. This suggest that Klebsiella planticola and K. ornithinolithica could be two newborn species. tuf and atpD genes exhibit little distances between Escherichia fergusonii and E. coli-Shigella species. Unfortunately, comparison with 16S rDNA could not be achieved because the E. fergusonii 16S rDNA sequence is not yet accessible in GenEMBL database. Therefore, the majority of phenotypically close enterobacteria could be easily discriminated genotypically using tuf and atpD gene sequences.

[0472] In conclusion, tuf and atpD genes exhibit phylogenies consistent with 16S rDNA genes phylogeny. For example, they reveal that the family Enterobacteriaceae is monophyletic. Moreover, tuf and atpD distances provide a higher discriminating power than 16S rDNA distances. In fact, tuf and atpD genes discriminate well between different genospecies and are conserved between strains of the same genetic species in such a way that primers and molecular probes for diagnostic purposes could be designed. Preliminary studies support these observations and diagnostic tests based on tuf and atpD sequence data to identify enterobacteria are currently under development.

### Example 44

### Testing New Pairs of PCR Primers Selected from Two Species-Specific Genomic DNA Fragments which are Objects of Our Assigned U.S. Pat. No. 6,001,564

[0473] Objective. The goal of these experiments is to demonstrate that it is relatively easy for a person skilled in the art to find other PCR primer pairs from the species-specific fragments used as targets for detection and identification of a variety of microorganisms. In fact, we wish to prove that the PCR primers previously tested by our group and which are objects of the present patent application are not the only possible good choices for diagnostic purposes. For this example, we used diagnostic targets described in our assigned U.S. Pat. No. 6,001,564.

[0474] Experimental strategy. We have selected randomly two species-specific genomic DNA fragments for this experiment. The first one is the 705-bp fragment specific to Staphylococcus epidermidis (SEQ ID NO: 36 from U.S. Pat. No. 6,001,564) while the second one is the 466-bp fragment specific to Moraxella catarrhalis (SEQ ID NO: 29 from U.S. Pat. No. 6,001,564). Subsequently, we have selected from these two fragments a number of PCR primer pairs other than those previously tested. We have chosen 5 new primer pairs from each of these two sequences which are well dispersed along the DNA fragment (FIGS. 11 and 12). We have tested these primers for their specificity and compared them with the original primers previously tested. For the specificity tests, we have tested all bacterial species closely related to the target species based on phylogenetic analysis with three conserved genes (rRNA genes, tuf and atpD). The rational for selecting a restricted number of bacterial species to evaluate the specificity of the new primer pairs is based on the fact that the lack of specificity of a DNA-based assay is attributable to the detection of closely related species which are more similar at the nucleotide level. Based on the phylogenetic analysis, we have selected (i) species from the closely related genus Staphylococcus, Enterococcus, Streptococcus and Listeria to test the specificity of the S. epidermidis-specific PCR assays and (ii) species from the closely related genus Moraxella, Kingella and Neisseria to test the specificity of the M. catarrhalis-specific PCR assays.

### Materials and Methods

[0475] Bacterial strains. All bacterial strains used for these experiments were obtained from the American Type Culture Collection (ATCC, Rockville, Md.).

[0476] Genomic DNA isolation. Genomic DNA was purified from the ATCC reference strains by using the G-nome DNA kit (Bio 101 Inc., Vista, Calif.).

[0477] Oligonucleotide design and synthesis. PCR primers were designed with the help of the Oligo™ primer analysis software Version 4.0 (National Biosciences Inc., Plymouth, Minn.) and synthesized using a model 391 DNA synthesizer (Applied Biosystems, Foster City, Calif.).

[0478] PCR assays. All PCR assays were performed by using genomic DNA purified from reference strains obtained from the ATCC. One μl of purified DNA preparation (containing 0.01 to 1 ng of DNA per μl) was added directly into the PCR reaction mixture. The 20 μL PCR reactions contained final concentrations of 50 mM KCl, 10 mM Tris-HCl (pH 9.0), 0.1% Triton X-100, 2.5 mM MgCl₂, 0.4 μM of each primer, 200 μM of each of the four dNTPs and 0.5 unit of Taq DNA polymerase (Promega, Madison, Wis.) combined with the TaqStart™ antibody (Clontech Laboratories Inc., Palo Alto, Calif.). An internal control was integrated into all amplification reactions to verify the efficiency of the amplification reaction as well as to ensure that significant PCR inhibition was absent. Primers amplifying a region of 252 by from a control plasmid added to each amplification reaction were used to provide the internal control. PCR reactions were then subjected to thermal cycling (3 min at 95° C. followed by 30 cycles of 1 second at 95° C. for the denaturation step and 30 seconds at 50 to 65° C. for the annealing-extension step) using a PTC-200 thermal cycler (MJ Research Inc., Watertown, Mass.). PCR amplification products were then analyzed by standard agarose gel (2%) electrophoresis. Amplification products were visualized in agarose gels containing 0.25 μg/mL of ethidium bromide under UV at 254 nm.

### Results

[0479] Tables 21 and 22 show the results of specificity tests with the 5 new primer pairs selected from SEQ ID NO: 29 (specific to M. catarrhalis from U.S. Pat. No. 6,001,564) and SEQ ID NO: 36 (specific to S. epidermidis from U.S. Pat. No. 6,001,564), respectively. In order to evaluate the performance of these new primers pairs, we compared them in parallel with the original primer pairs previously tested.

[0480] For M. catarrhalis, all of the 5 selected PCR primer pairs were specific for the target species because none of the closely related species could be amplified (Table 21). In fact, the comparison with the original primer pair SEQ ID NO: 118+SEQ ID NO: 119 (from U.S. Pat. No. 6,001,564) revealed that all new pairs showed identical results in terms of specificity and sensitivity thereby suggesting their suitability for diagnostic purposes.

[0481] For S. epidermidis, 4 of the 5 selected PCR primer pairs were specific for the target species (Table 22). It should be noted that for 3 of these four primer pairs the annealing temperature had to be increased from 55° C. to 60 or 65° C. to attain specificity for S. epidermidis. Again the comparison with the original primer pair SEQ ID NO: 145+SEQ ID NO: 146 (from U.S. Pat. No. 6,001,564) revealed that these four primer pairs were as good as the original pair. Increasing the annealing temperature for the PCR amplification is well known by persons skilled in the art to be a very effective way to improve the specificity of a PCR assay (Persing et al., 1993, Diagnostic Molecular Microbiology: Principles and Applications, American Society for Microbiology, Washington, D.C.; Ehrlich and Greenberg, 1994, PCR-based Diagnostics in Infectious Disease, Blackwell Scientific Publications, Boston, Mass.). In fact, those skilled in the art are well aware of the fact that the annealing temperature is critical for the optimization of PCR assays. Only the primer pair VBsep3+VBsep4 amplified bacterial species other than S. epidermidis including the staphylococcal species S. capitis, S. cohnii, S. aureus, S. haemolyticus and S. hominis (Table 22). For this non-specific primer pair, increasing the annealing temperature from 55 to 65° C. was not sufficient to attain the desired specificity. One possible explanation for the fact that it appears slightly easier to select species-specific primers for M catarrhalis than for S. epidermidis is that M catarrhalis is more isolated in phylogenetic trees than S. epidermidis. The large number of coagulase negative staphylococcal species such as S. epidermidis is largely responsible for this phylogenetic clustering.

### Conclusion

[0482] These experiment clearly show that it is relatively easy for a person skilled in the art to select, from the species-specific DNA fragments selected as target for identification, PCR primer pairs suitable for diagnostic purposes other than those previously tested. The amplification conditions can be optimize by modifying critical variables such as the annealing temperature to attain the desired specificity and sensitivity. Consequently, we consider that it is legitimate to claim any possible primer sequences selected from the species-specific fragment and that it would be unfair to grant only the claims dealing with the primer pairs previously tested. By extrapolation, these results strongly suggest that it is also relatively easy for a person skilled in the art to select, from the species-specific DNA fragments, DNA probes suitable for diagnostic purposes other than those previously tested.

### Example 45

### Testing Modified Versions of PCR Primers Derived from the Sequence of Several Primers which are Objects of U.S. Pat. No. 6,001,564.

[0483] Objective. The purpose of this project is to verify the efficiency of amplification by modified PCR primers derived from primers previously tested. The types of primer modifications to be tested include (i) variation of the sequence at one or more nucleotide positions and (ii) increasing or reducing the length of the primers. For this example, we used diagnostic targets described in U.S. Pat. No. 6,001,564.

### Experimental Strategy:

[0484] Testing Primers with Nucleotide Changes

[0485] We have designed 13 new primers which are derived from the S. epidermidis-specific SEQ ID NO: 146 from U.S. Pat. No. 6,001,564 (Table 23). These primers have been modified at one or more nucleotide positions. As shown in Table 23, the nucleotide changes were introduced all along the primer sequence. Furthermore, instead of modifying the primer at any nucleotide position, the nucleotide changes were introduced at the third position of each codon to better reflect potential genetic variations in vivo. It should be noted that no nucleotide changes were introduced at the 3′ end of the oligonucleotide primers because those skilled in the art are well aware of the fact that mismatches at the 3′ end should be avoided (Persing et al., 1993, Diagnostic Molecular Microbiology: Principles and Applications, American Society for Microbiology, Washington, D.C.). All of these modified primers were tested in PCR assays in combination with SEQ ID NO: 145 from U.S. Pat. No. 6,001,564 and the efficiency of the amplification was compared with the original primer pair SEQ ID NO: 145+SEQ ID NO: 146 previously tested in U.S. Pat. No. 6,001,564.

### Testing Shorter or Longer Versions of Primers

[0486] We have designed shorter and longer versions of the original S. epidermidis-specific PCR primer pair SEQ ID NO: 145+146 from U.S. Pat. No. 6,001,564 (Table 24) as well as shorter versions of the original P. aeruginosa-specific primer pair SEQ ID NO: 83+84 from U.S. Pat. No. 6,001,564 (Table 25). As shown in Tables 24 and 25, both primers of each pair were shortened or lengthen to the same length. Again, those skilled in the art know that the melting temperature of both primers from a pair should be similar to avoid preferential binding at one primer binding site which is detrimental in PCR (Persing et al., 1993, Diagnostic Molecular Microbiology: Principles and Applications, American Society for Microbiology, Washington, D.C.; Ehrlich and Greenberg, 1994, PCR-based Diagnostics in Infectious Disease, Blackwell Scientific Publications, Boston, Mass.). All of these shorter or longer primer versions were tested in PCR assays and the efficiency of the amplification was compared with the original primer pair SEQ ID NOs 145 and 146.

### Materials and Methods

[0487] See the Materials and methods section of Example 44.

### Results

[0488] Testing Primers with Nucleotide Changes

[0489] The results of the PCR assays with the 13 modified versions of SEQ ID NO: 146 from U.S. Pat. No. 6,001,564 are shown in Table 23. The 8 modified primers having a single nucleotide variation showed an efficiency of amplification identical to the original primer pair based on testing with 3 different dilutions of genomic DNA. The four primers having two nucleotide variations and primer VBmut12 having 3 nucleotide changes also showed PCR results identical to those obtained with the original pair. Finally, primer VBmut13 with four nucleotide changes showed a reduction in sensitivity by approximately one log as compared with the original primer pair. However, reducing the annealing temperature from 55 to 50° C. gave an efficiency of amplification very similar to that observed with the original primer pair (Table 23). In fact, reducing the annealing temperature of PCR cycles represents an effective way to reduce the stringency of hybridization for the primers and consequently allows the binding of probes with mismatches (Persing et al., 1993, Diagnostic Molecular Microbiology: Principles and Applications, American Society for Microbiology, Washington, D.C.). Subsequently, we have confirmed the specificity of the PCR assays with each of these 13 modified versions of SEQ ID NO: 146 from U.S. Pat. No. 6,001,564 by performing amplifications from all bacterial species closely related to S. epidermidis which are listed in Table 22.

### Testing Shorter or Longer Versions of Primers

[0490] For these experiments, two primer pairs were selected: i) SEQ ID NO: 145+146 from U.S. Pat. No. 6,001,564 (specific to S. epidermidis) which are AT rich and ii) SEQ ID NO: 83+84 (specific to P. aeruginosa) which are GC rich. For the AT rich sequence, primers of 15 to 30 nucleotide in length were designed (Table 24) while for the GC rich sequences, primers of 13 to 19 nucleotide in length were designed (Table 25).

[0491] Table 24 shows that, for an annealing temperature of 55° C., the 30-25-, 20- and 17-nucleotide versions of SEQ ID NO: 145 and 146 from U.S. Pat. No. 6,001,564 all showed identical results as compared with the original primer pair except that the 17-nucleotide version amplified slightly less efficiently the S. epidermidis DNA. Reducing the annealing temperature from 55 to 45° C. for the 17-nucleotide version allowed to increase the amplification efficiency to a level very similar to that with the original primer pair (SEQ ID NO: 145+146 from U.S. Pat. No. 6,001,564). Regarding the 15-nucleotide version, there was amplification of S. epidermidis DNA only when the annealing temperature was reduced to 45° C. Under those PCR conditions the assay remained S. epidermidis-specific but the amplification signal with S. epidermidis DNA was slightly lower as compared with the original primer pair. Subsequently, we have further confirmed the specificity of the shorter or longer versions by amplifying DNA from all bacterial species closely related to S. epidermidis which are listed in Table 22.

[0492] Table 25 shows that, for an annealing temperature of 55° C., all shorter versions of SEQ ID NO: 83 and 84 from U.S. Pat. No. 6,001,564 showed identical PCR results as compared with the original primer pair. As expected, these results show that it is simpler to reduce the length of GC rich as compared with AT rich. This is attributable to the fact that GC binding is more stable than AT binding.

### Conclusion

[0493] Testing Primers with Nucleotide Changes

[0494] The above experiments clearly show that PCR primers may be modified at one or more nucleotide positions without affecting the specificity and the sensitivity of the PCR assay. These results strongly suggest that a given oligonucleotide can detect variant genomic sequences from the target species. In fact, the nucleotide changes in the selected primers were purposely introduced at the third position of each codon to mimic nucleotide variation in genomic DNA. Thus we conclude that it is justified to claim “a variant thereof” for i) the SEQ IDs of the fragments and oligonucleotides which are object of the present patent application and ii) genomic variants of the target species.

### Testing Shorter or Longer Versions of Primers

[0495] The above experiments clearly show that PCR primers may be shorter or longer without affecting the specificity and the sensitivity of the PCR assay. We have showed that oligonucleotides ranging in sizes from 13 to 30 nucleotides may be as specific and sensitive as the original primer pair from which they were derived. Consequently, these results suggest that it is not exaggerated to claim sequences having at least 12 nucleotide in length.

[0496] This invention has been described herein above, and it is readily apparent that modifications can be made thereto without departing from the spirit of this invention. These modifications are under the scope of this invention, as defined in the appended claims.

TABLE 1
Distribution (%) of nosocomial pathogens for various human infections in
USA (1990-1992)¹.

| Pathogen | UTI² | SSI³ | BSI⁴ | Pneumonia | CSF⁵ |
|---|---|---|---|---|---|
| Escherichia coli | 27 | 9 | 5 | 4 | 2 |
| Staphylococcus aureus | 2 | 21 | 17 | 21 | 2 |
| Staphylococcus epidermidis | 2 | 6 | 20 | 0 | 1 |
| Enterococcus faecalis | 16 | 12 | 9 | 2 | 0 |
| Enterococcus faecium | 1 | 1 | 0 | 0 | 0 |
| Pseudomonas aeruginosa | 12 | 9 | 3 | 18 | 0 |
| Klebsiella pneumoniae | 7 | 3 | 4 | 9 | 0 |
| Proteus mirabilis | 5 | 3 | 1 | 2 | 0 |
| Streptococcus pneumoniae | 0 | 0 | 3 | 1 | 18 |
| Group B Streptococci | 1 | 1 | 2 | 1 | 6 |
| Other streptococci | 3 | 5 | 2 | 1 | 3 |
| Haemophilus influenzae | 0 | 0 | 0 | 6 | 45 |
| Neisseria meningitidis | 0 | 0 | 0 | 0 | 14 |
| Listeria monocytogenes | 0 | 0 | 0 | 0 | 3 |
| Other enterococci | 1 | 1 | 0 | 0 | 0 |
| Other staphylococci | 2 | 8 | 13 | 2 | 0 |
| Candida albicans | 9 | 3 | 5 | 5 | 0 |
| Other Candida | 2 | 1 | 3 | 1 | 0 |
| Enterobacter sp. | 5 | 7 | 4 | 12 | 2 |
| Acinetobacter sp. | 1 | 1 | 2 | 4 | 2 |
| Citrobacter sp. | 2 | 1 | 1 | 1 | 0 |
| Serratia marcescens | 1 | 1 | 1 | 3 | 1 |
| Other Klebsiella | 1 | 1 | 1 | 2 | 1 |
| Others | 0 | 6 | 4 | 5 | 0 |

¹Data recorded by the National Nosocomial Infections Surveillance (NNIS) from 80 hospitals (Emori and Gaynes, 1993, Clin. Microbiol. Rev., 6: 428-442).
²Urinary tract infection.
³Surgical site infection.
⁴Bloodstream infection.
⁵Cerebrospinal fluid.

TABLE 2
Distribution (%) of bloodstream infection pathogens in Quebec
(1995), Canada (1992), UK (1969-1988) and USA (1990-1992).

| | | | UK³ | | |
|---|---|---|---|---|---|
| | | | Community- | Hospital- | USA⁴ |
| Organism | Quebec¹ | Canada² | acquired | acquired | Hospital-acquired |
| E. coli | 15.6 | 53.8 | 24.8 | 20.3 | 5.0 |
| S. epidermidis and | 25.8 | — | 0.5 | 7.2 | 31.0 |
| other CoNS⁵ | | | | | |
| S. aureus | 9.6 | — | 9.7 | 19.4 | 16.0 |
| S. pneumoniae | 6.3 | — | 22.5 | 2.2 | — |
| E. faecalis | 3.0 | — | 1.0 | 4.2 | — |
| E. faecium | 2.6 | — | 0.2 | 0.5 | — |
| Enterococcus sp. | — | — | — | — | 9.0 |
| H. influenzae | 1.5 | — | 3.4 | 0.4 | — |
| P. aeruginosa | 1.5 | 8.2 | 1.0 | 8.2 | 3.0 |
| K. pneumoniae | 3.0 | 11.2 | 3.0 | 9.2 | 4.0 |
| P. mirabilis | — | 3.9 | 2.8 | 5.3 | 1.0 |
| S. pyogenes | — | — | 1.9 | 0.9 | — |
| Enterobacter sp. | 4.1 | 5.5 | 0.5 | 2.3 | 4.0 |
| Candida sp. | 8.5 | — | — | 1.0 | 8.0 |
| Others | 18.5 | 17.4 | 28.7 | 18.9 | 19.0 |

¹Data obtained for 270 isolates collected at the Centre Hospitalier del'Université Laval (CHUL) during a 5 month period (May to October 1995).
²Data from 10 hospitals throughout Canada representing 941 gram-negative isolates. (Chamberland et al., 1992, Clin. Infect. Dis., 15: 615-628).
³Data from a 20-year study (1969-1988) for nearly 4000 isolates. (Eykyn et al., 1990, J. Antimicrob. Chemother., Suppl. C, 25: 41-58).
⁴Data recorded by the National Nosocomial Infections Surveillance (NNIS) from 80 hospitals (Emori and Gaynes, 1993, Clin. Microbiol. Rev., 6: 428-442).
⁵Coagulase-negative staphylococci.

TABLE 3
Distribution of positive and negative clinical specimens tested at the
microbiology laboratory of the CHUL (February 1994-January 1995).

| | | | % |
|---|---|---|---|
| Clinical specimens | No. of samples | % of positive | of negative |
| and/or sites | tested (%) | specimens | specimens |
| Urine | 17,981 (54.5) | 19.4 | 80.6 |
| Blood culture/marrow | 10,010 (30.4) | 6.9 | 93.1 |
| Sputum | 1,266 (3.8) | 68.4 | 31.6 |
| Superficial pus | 1,136 (3.5) | 72.3 | 27.7 |
| Cerebrospinal fluid | 553 (1.7) | 1.0 | 99.0 |
| Synovial fluid | 523 (1.6) | 2.7 | 97.3 |
| Respiratory tract | 502 (1.5) | 56.6 | 43.4 |
| Deep pus | 473 (1.4) | 56.8 | 43.2 |
| Ears | 289 (0.9) | 47.1 | 52.9 |
| Pleural and pericardial fluid | 132 (0.4) | 1.0 | 99.0 |
| Peritoneal fluid | 101 (0.3) | 28.6 | 71.4 |
| Total: | 32,966 (100.0) | 20.0 | 80.0 |

TABLE 4
Example of microbial species for which tuf and/or atpD and/or recA
nucleic acids and/or sequences are used in the present invention.
Bacterial species

Abiotrophia adiacens
Abiotrophia defectiva
Achromobacter xylosoxidans subsp. denitrificans
Acetobacterium woodi
Acetobacter aceti
Acetobacter altoacetigenes
Acetobacter polyoxogenes
Acholeplasma laidlawii
Acidothermus cellulolyticus
Acidiphilum facilis
Acinetobacter baumannii
Acinetobacter calcoaceticus
Acinetobacter lwoffii
Actinomyces meyeri
Aerococcus viridans
Aeromonas hydrophila
Aeromonas salmonicida
Agrobacterium radiobacter
Agrobacterium tumefaciens
Alcaligenes faecalis subsp. faecalis
Allochromatium vinosum
Anabaena variabilis
Anacystis nidulans
Anaerorhabdus furcosus
Aquifex aeolicus
Aquifex pyrophilus
Arcanobacterium haemolyticum
Archaeoglobus fulgidus
Azotobacter vinelandii
Bacillus anthracis
Bacillus cereus
Bacillus firmus
Bacillus halodurans
Bacillus megaterium
Bacillus mycoides
Bacillus pseudomycoides
Bacillus stearothermophilus
Bacillus subtilis
Bacillus thuringiensis
Bacillus weihenstephanensis
Bacteroides distasonis
Bacteroides fragilis
Bacteroides forsythus
Bacteroides ovatus
Bacteroides vulgatus
Bartonella henselae
Bifidobacterium adolescentis
Bifidobacterium breve
Bifidobacterium dentium
Bifidobacterium longum
Blastochloris viridis
Borrelia burgdorferi
Bordetella pertussis
Bordetella bronchiseptica
Brucella abortus
Brevibacterium linens
Brevibacterium flavum
Brevundimonas diminuta
Buchnera aphidicola
Budvicia aquatica
Burkholderia cepacia
Burkholderia mallei
Burkholderia pseudomallei
Buttiauxella agrestis
Butyrivibrio fibrisolvens
Campylobacter coli
Campylobacter curvus
Campylobacter fetus subsp. fetus
Campylobacter fetus subsp. venerealis
Campylobacter gracilis
Campylobacter jejuni
Campylobacter jejuni subsp. doylei
Campylobacter jejuni subsp. jejuni
Campylobacter lari
Campylobacter rectus
Campylobacter sputorum subsp. sputorum
Campylobacter upsaliensis
Cedecea davisae
Cedecea lapagei
Cedecea neteri
Chlamydia pneumoniae
Chlamydia psittaci
Chlamydia trachomatis
Chlorobium vibrioforme
Chloroflexus aurantiacus
Chryseobacterium meningosepticum
Citrobacter amalonaticus
Citrobacter braakii
Citrobacter farmeri
Citrobacter freundii
Citrobacter koseri
Citrobacter sedlakii
Citrobacter werkmanii
Citrobacter youngae
Clostridium acetobutylicum
Clostridium beijerinckii
Clostridium bifermentans
Clostridium botulinum
Clostridium difficile
Clostridium innocuum
Clostridium histolyticum
Clostridium novyi
Clostridium septicum
Clostridium perfringens
Clostridium ramosum
Clostridium tertium
Clostridium tetani
Comamonas acidovorans
Corynebacterium accolens
Corynebacterium bovis
Corynebacterium cervicis
Corynebacterium diphtheriae
Corynebacterium flavescens
Corynebacterium genitalium
Corynebacterium glutamicum
Corynebacterium jeikeium
Corynebacterium kutscheri
Corynebacterium minutissimum
Corynebacterium mycetoides
Corynebacterium pseudodiphtheriticum
Corynebacterium pseudogenitalium
Corynebacterium pseudotuberculosis
Corynebacterium renale
Corynebacterium striatum
Corynebacterium ulcerans
Corynebacterium urealyticum
Corynebacterium xerosis
Coxiella burnetii
Cytophaga lytica
Deinococcus radiodurans
Deinonema sp.
Edwardsiella hoshinae
Edwardsiella tarda
Ehrlichia canis
Ehrlichia risticii
Eikenella corrodens
Enterobacter aerogenes
Enterobacter agglomerans
Enterobacter amnigenus
Enterobacter asburiae
Enterobacter cancerogenus
Enterobacter cloacae
Enterobacter gergoviae
Enterobacter hormaechei
Enterobacter sakazakii
Enterococcus avium
Enterococcus casseliflavus
Enterococcus cecorum
Enterococcus columbae
Enterococcus dispar
Enterococcus durans
Enterococcus faecalis
Enterococcus faecium
Enterococcus flavescens
Enterococcus gallinarum
Enterococcus hirae
Enterococcus malodoratus
Enterococcus mundtii
Enterococcus pseudoavium
Enterococcus raffinosus
Enterococcus saccharolyticus
Enterococcus solitarius
Enterococcus sulfureus
Clostridium sordellii
Erwinia amylovora
Erwinia carotovora
Escherichia coli
Escherichia fergusonii
Escherichia hermannii
Escherichia vulneris
Eubacterium lentum
Eubacterium nodatum
Ewingella americana
Francisella tularensis
Frankia alni
Fervidobacterium islandicum
Fibrobacter succinogenes
Flavobacterium ferrigeneum
Flexistipes sinusarabici
Fusobacterium gonidiaformans
Fusobacterium necrophorum subsp. necrophorum
Fusobacterium nucleatum subsp. polymorphum
Gardnerella vaginalis
Gemella haemolysans
Gemella morbillorum
Globicatella sanguis
Gloeobacter violaceus
Gloeothece sp.
Gluconobacter oxydans
Haemophilus actinomycetemcomitans
Haemophilus aphrophilus
Haemophilus ducreyi
Haemophilus haemolyticus
Haemophilus influenzae
Haemophilus parahaemolyticus
Haemophilus parainfluenzae
Haemophilus paraphrophilus
Haemophilus segnis
Hafnia alvei
Halobacterium marismortui
Halobacterium salinarum
Haloferax volcanii
Helicobacter pylori
Herpetoshiphon aurantiacus
Kingella kingae
Klebsiella ornithinolytica
Klebsiella oxytoca
Klebsiella planticola
Klebsiella pneumoniae subsp. ozaenae
Klebsiella pneumoniae subsp. pneumoniae
Klebsiella pneumoniae subsp. rhinoscleromatis
Klebsiella terrigena
Kluyvera ascorbata
Kluyvera cryocrescens
Kluyvera georgiana
Kocuria kristinae
Lactobacillus acidophilus
Lactobacillus garvieae
Lactobacillus paracasei
Lactobacillus casei subsp. casei
Lactococcus garvieae
Lactococcus lactis
Lactococcus lactis subsp. lactis
Legionella micdadei
Legionella pneumophila subsp. pneumophila
Leminorella grimontii
Leminorella richardii
Leptospira biflexa
Leptospira interrogans
Leuconostoc mesenteroides subsp. dextranicum
Listeria innocua
Listeria ivanovii
Listeria monocytogenes
Listeria seeligeri
Macrococcus caseolyticus
Magnetospirillum magnetotacticum
Megamonas hypermegale
Methanobacterium thermoautotrophicum
Methanococcus jannaschii
Methanococcus vannielii
Methanosarcina barkeri
Methanosarcina jannaschii
Methylobacillus flagellatum
Methylomonas clara
Micrococcus luteus
Micrococcus lylae
Mitsuokella multacidus
Mobiluncus curtisii subsp. holmesii
Moellerella thermoacetica
Moellerella wisconsensis
Moorella thermoacetica
Moraxella catarrhalis
Moraxella osloensis
Morganella morganii subsp. morganii
Mycobacterium avium
Mycobacterium bovis
Mycobacterium gordonae
Mycobacterium kansasii
Mycobacterium leprae
Mycobacterium terrae
Mycobacterium tuberculosis
Mycoplasma capricolum
Mycoplasma gallisepticum
Mycoplasma genitalium
Mycoplasma hominis
Mycoplasma pirum
Mycoplasma mycoides
Mycoplasma pneumoniae
Mycoplasma pulmonis
Mycoplasma salivarium
Myxococcus xanthus
Neisseria animalis
Neisseria canis
Neisseria cinerea
Neisseria cuniculi
Neisseria elongata subsp. elongata
Neisseria elongata subsp. intermedia
Neisseria flava
Neisseria flavescens
Neisseria gonorrhoeae
Neisseria lactamica
Leclercia adecarboxylata
Neisseria meningitidis
Neisseria mucosa
Neisseria perflava
Neisseria pharyngis var. flava
Neisseria polysaccharea
Neisseria sicca
Neisseria subflava
Neisseria weaveri
Obesumbacterium proteus
Ochrobactrum anthropi
Pantoea agglomerans
Pantoea dispersa
Paracoccus denitrificans
Pasteurella multocida
Pectinatus frisingensis
Peptococcus niger
Peptostreptococcus anaerobius
Peptostreptococcus asaccharolyticus
Peptostreptococcus prevotii
Phormidium ectocarpi
Pirellula marina
Planobispora rosea
Plesiomonas shigelloides
Plectonema boryanum
Porphyromonas asaccharolytica
Porphyromonas gingivalis
Pragia fontium
Prevotella buccalis
Prevotella melaninogenica
Prevotella oralis
Prevotella ruminocola
Prochlorothrix hollandica
Propionibacterium acnes
Propionigenium modestum
Proteus mirabilis
Proteus penneri
Proteus vulgaris
Providencia alcalifaciens
Providencia rettgeri
Providencia rustigianii
Providencia stuartii
Pseudomonas aeruginosa
Pseudomonas fluorescens
Pseudomonas putida
Pseudomonas stutzeri
Psychrobacter phenylpyruvicum
Pyrococcus abyssi
Rahnella aquatilis
Rickettsia prowazekii
Rhizobium leguminosarum
Rhizobium phaseoli
Rhodobacter capsulatus
Rhodobacter sphaeroides Rhodopseudomonas
palustris
Rhodospirillum rubrum
Ruminococcus albus
Ruminococcus bromii
Salmonella bongori
Salmonella choleraesuis subsp. arizonae
Salmonella choleraesuis subsp choleraesuis
Salmonella choleraesuis subsp. diarizonae
Salmonella choleraesuis subsp. houtenae
Salmonella choleraesuis subsp. indica
Salmonella choleraesuis subsp. salamae
Serpulina hyodysenteriae
Serratia ficaria
Serratia fonticola
Serratia grimesii
Serratia liquefaciens
Serratia marcescens
Serratia odorifera
Serratia plymuthica
Serratia rubidaea
Shewanella putrefaciens
Shigella boydii
Shigella dysenteriae
Shigella flexneri
Shigella sonnei
Sinorhizobium meliloti
Spirochaeta aurantia
Staphylococcus aureus
Staphylococcus aureus subsp. aureus
Staphylococcus auricularis
Staphylococcus capitis subsp. capitis
Staphylococcus cohnii subsp. cohnii
Staphylococcus epidermidis
Staphylococcus haemolyticus
Staphylococcus hominis
Staphylococcus hominis subsp. hominis
Staphylococcus lugdunensis
Staphylococcus saprophyticus
Staphylococcus sciuri subsp. sciuri
Staphylococcus simulans
Staphylococcus warneri
Stigmatella aurantiaca
Stenotrophomonas maltophilia
Streptococcus acidominimus
Streptococcus agalactiae
Streptococcus anginosus
Streptococcus bovis
Streptococcus cricetus
Streptococcus cristatus
Streptococcus downei
Streptococcus dysgalactiae
Streptococcus equi subsp. equi
Streptococcus ferus
Streptococcus gordonii
Streptococcus macacae
Streptococcus mitis
Streptococcus mutans
Streptococcus oralis
Streptococcus parasanguinis
Streptococcus pneumoniae
Streptococcus pyogenes
Streptococcus ratti
Streptococcus salivarius
Streptococcus salivarius subsp. thermophilus
Streptococcus sanguinis
Streptococcus sobrinus
Streptococcus suis
Streptococcus uberis
Streptococcus vestibularis
Streptomyces anbofaciens
Streptomyces aureofaciens
Streptomyces cinnamoneus
Streptomyces coelicolor
Streptomyces collinus
Streptomyces lividans
Streptomyces netropsis
Streptomyces ramocissimus
Streptomyces rimosus
Streptomyces venezuelae
Succinivibrio dextrinosolvens
Synechococcus sp.
Synechocystis sp.
Tatumella ptyseos
Taxeobacter occealus
Tetragenococcus halophilus
Thermoplasma acidophilum
Thermotoga maritima
Thermus aquaticus
Thermus thermophilus
Thiobacillus ferrooxidans
Thiomonas cuprina
Trabulsiella guamensis
Treponema pallidum
Ureaplasma urealyticum
Veillonella parvula
Vibrio alginolyticus
Vibrio anguillarum
Vibrio cholerae
Vibrio mimicus
Wolinella succinogenes
Xanthomonas citri
Xanthomonas oryzae
Xenorhabdus bovieni
Xenorhabdus nematophilus
Yersinia bercovieri
Yersinia enterocolitica
Yersinia frederiksensii
Yersinia intermedia
Yersinia pestis
Yersinia pseudotuberculosis
Yersinia rohdei
Yokenella regensburgei
Zoogloea ramigera

TABLE 4
Example of microbial species for which tuf and/or atpD and/or recA
nucleic acids and/or sequences are used in the present invention
(continued)

Fungal species
Absidia corymbifera
Absidia glauca
Alternaria alternate
Arxula adeninivorans
Aspergillus flavus
Aspergillus fumigatus
Aspergillus nidulans
Aspergillus niger
Aspergillus oryzae
Aspergillus terreus
Aspergillus versicolor
Aureobasidium pullulans
Basidiobolus ranarum
Bipolaris hawaiiensis
Bilophila wadsworthia
Blastoschizomyces capitatus
Blastomyces dermatitidis
Candida albicans
Candida catenulata
Candida dubliniensis
Candida famata
Candida glabrata
Candida guilliermondii
Candida haemulonii
Candida inconspicua
Candida kefyr
Candida krusei
Candida lambica
Candida lusitaniae
Candida norvegica
Candida norvegensis
Candida parapsilosis
Candida rugosa
Candida sphaerica
Candida tropicalis
Candida utilis
Candida viswanathii
Candida zeylanoides
Cladophialophora carrionii
Coccidioides immitis
Coprinus cinereus
Cryptococcus albidus
Cryptococcus humicolus
Cryptococcus laurentii
Cryptococcus neoformans
Cunninghamella bertholletiae
Curvularia lunata
Emericella nidulans
Emmonsia parva
Eremothecium gossypii
Exophiala dermatitidis
Exophiala jeanselmei
Exophiala moniliae
Exserohilum rostratum
Eremothecium gossypii
Fonsecaea pedrosoi
Fusarium moniliforme
Fusarium oxysporum
Fusarium solani
Geotrichum sp.
Histoplasma capsulatum
Hortaea werneckii
Issatchenkia orientalis Kudrjanzev
Kluyveromyces lactis
Malassezia furfur
Malassezia pachydermatis
Malbranchea filamentosa
Metschnikowia pulcherrima
Microsporum audouinii
Microsporum canis
Mucor circinelloides
Neurospora crassa
Paecilomyces lilacinus
Paracoccidioides brasiliensis
Penicillium marneffei
Phialaphora verrucosa
Pichia anomala
Piedraia hortai
Podospora anserina
Podospora curvicolla
Puccinia graminis
Pseudallescheria boydii
Reclinomonas americana
Rhizomucor racemosus
Rhizopus oryzae
Rhodotorula minuta
Rhodotorula mucilaginosa
Saccharomyces cerevisiae
Saksenaea vasiformis
Schizosaccharomyces pombe
Scopulariopsis koningii
Sordaria macrospora
Sporobolomyces salmonicolor
Sporothrix schenckii
Stephanoascus ciferrii
Syncephalastrum racemosum
Trichoderma reesei
Trichophyton mentagrophytes
Trichophyton rubrum
Trichophyton tonsurans
Trichosporon cutaneum
Ustilago maydis
Wangiella dermatitidis
Yarrowia lipolytica
Parasitical species
Babesia bigemina
Babesia bovis
Babesia microti
Blastocystis hominis
Crithidia fasciculata
Cryptosporidium parvum
Entamoeba histolytica
Giardia lamblia
Kentrophoros sp.
Leishmania aethiopica
Leishmania amazonensis
Leishmania braziliensis
Leishmania donovani
Leishmania infantum
Leishmania enriettii
Leishmania gerbilli
Leishmania guyanensis
Leishmania hertigi
Leishmania major
Leishmania mexicana
Leishmania panamensis
Leishmania tarentolae
Leishmania tropica
Neospora caninum
Onchocerca volvulus
Plasmodium berghei
Plasmodium falciparum
Plasmodium knowlesi
Porphyra purpurea
Toxoplasma gondii
Treponema pallidum
Trichomonas tenax
Trichomonas vaginalis
Trypanosoma brucei
Trypanosoma brucei subsp. brucei
Trypanosoma congolense
Trypanosoma cruzi

TABLE 5
Antimicrobial agents resistance genes selected for diagnostic purposes

| | | | | SEQ |
|---|---|---|---|---|
| Gene | Antimicrobial agent | Bacteria¹ | ACCESSION NO. | ID NO. |
| aac(3)-Ib² | Aminoglycosides | Enterobacteriaceae | L06157 | |
| | | Pseudomonads | | |
| aac(3)-IIb² | Aminoglycosides | Enterobacteriaceae, | M97172 | |
| | | Pseudomonads | | |
| aac(3)-IVa² | Aminoglycosides | Enterobacteriaceae | X01385 | |
| aac(3)-VIa² | Aminoglycosides | Enterobacteriaceae, | M88012 | |
| | | Pseudomonads | | |
| aac(2′)-1a² | Aminoglycosides | Enterobacteriaceae, | X04555 | |
| | | Pseudomonads | | |
| aac(6′)-aph(2″)² | Aminoglycosides | Enterococcus sp., | | 83-86³ |
| | | Staphylococcus sp. | | |
| aac(6′)-Ia,² | Aminoglycosides | Enterobacteriaceae, | M18967 | |
| | | Pseudomonads | | |
| aac(6′)-Ic² | Aminoglycosides | Enterobacteriaceae, | M94066 | |
| | | Pseudomonads | | |
| aac(6′)-IIa² | Aminoglycosides | Pseudomonads | | 112⁴ |
| aadB [ant(2″)-Ia²] | Aminoglycosides | Enterobacteriaceae | | 53-54³ |
| aacC1 [aac(3)-Ia²] | Aminoglycosides | Pseudomonads | | 55-56³ |
| aacC2 [aac(3)-IIa²] | Aminoglycosides | Pseudomonads | | 57-58³ |
| aacC3 [aac(3)-III²] | Aminoglycosides | Pseudomonads | | 59-60³ |
| aacA4 [aac(6′)-Ib²] | Aminoglycosides | Pseudomonads | | 65-66³ |
| ant(3″)-Ia² | Aminoglycosides | Enterobacteriaceae, | X02340 | |
| | | Enterococcus sp., | M10241 | |
| | | Staphylococcus sp. | | |
| ant(4′)-Ia² | Aminoglycosides | Staphylococcus sp. | V01282 | |
| aph(3′)-Ia² | Aminoglycosides | Enterobacteriaceae, | J01839 | |
| | | Pseudomonads | | |
| aph(3′)-IIa² | Aminoglycosides | Enterobacteriaceae, | V00618 | |
| | | Pseudomonads | | |
| aph(3′)-IIIa² | Aminoglycosides | Enterococcus sp., | V01547 | |
| | | Staphylococcus sp. | | |
| aph(3′)-VIa² | Aminoglycosides | Enterobacteriaceae, | X07753 | |
| | | Pseudomonads | | |
| rpsL² | Streptomycin | M. tuberculosis, | X80120 | |
| | | M. avium complex | U14749 | |
| | | | X70995 | |
| | | | L08011 | |
| bla_{OXA}^{5,6} | β-lactams | Enterobacteriaceae, | Y10693 | 110⁴ |
| | | Pseudomonads | AJ238349 | |
| | | | AJ009819 | |
| | | | X06046 | |
| | | | X03037 | |
| | | | X07260 | |
| | | | U13880 | |
| | | | X75562 | |
| | | | AF034958 | |
| | | | J03427 | |
| | | | Z22590 | |
| | | | U59183 | |
| | | | L38523 | |
| | | | U63835 | |
| | | | AF043100 | |
| | | | AF060206 | |
| | | | U85514 | |
| | | | AF043381 | |
| | | | AF024602 | |
| | | | AF064820 | |
| bla_{ROB}⁵ | β-lactams | Haemophilus sp. | | 45-48³ |
| bla_{SHV}^{5,6} | β-lactams | Enterobacteriacea, | AF124984 | 41-44³ |
| | | Pseudomonas aeruginosa | AF148850 | |
| | | | M59181 | |
| | | | X98099 | |
| | | | M33655 | |
| | | | AF148851 | |
| | | | X53433 | |
| | | | L47119 | |
| | | | AF074954 | |
| | | | X53817 | |
| | | | AF096930 | |
| | | | X55640 | |
| | | | Y11069 | |
| | | | U20270 | |
| | | | U92041 | |
| | | | S82452 | |
| | | | X98101 | |
| | | | X98105 | |
| | | | AF164577 | |
| | | | AJ011428 | |
| | | | AF116855 | |
| | | | AB023477 | |
| | | | AF293345 | |
| | | | AF227204 | |
| | | | AF208796 | |
| | | | AF132290 | |
| bla_{TEM}^{5,6} | β-lactams | Enterobacteriaceae, | AF012911 | 37-40³ |
| | | Neisseria sp., | U48775 | |
| | | Haemophilus sp. | AF093512 | |
| | | | AF052748 | |
| | | | X64523 | |
| | | | Y13612 | |
| | | | X57972 | |
| | | | AF157413 | |
| | | | U31280 | |
| | | | U36911 | |
| | | | U48775 | |
| | | | V00613 | |
| | | | X97254 | |
| | | | AJ012256 | |
| | | | X04515 | |
| | | | AF126482 | |
| | | | U09188 | |
| | | | M88143 | |
| | | | Y14574 | |
| | | | AF188200 | |
| | | | AJ251946 | |
| | | | Y17581 | |
| | | | Y17582 | |
| | | | Y17583 | |
| | | | M88143 | |
| | | | U37195 | |
| | | | Y17584 | |
| | | | X64523 | |
| | | | U95363 | |
| | | | Y10279 | |
| | | | Y10280 | |
| | | | Y10281 | |
| | | | AF027199 | |
| | | | AF104441 | |
| | | | AF104442 | |
| | | | AF062386 | |
| | | | X57972 | |
| | | | AF047171 | |
| | | | AF188199 | |
| | | | AF157553 | |
| | | | AF190694 | |
| | | | AF190695 | |
| | | | AF190693 | |
| | | | AF190692 | |
| bla_{SHV}^{5,6} | β-lactams | Enterobacteriacea, | AF124984 | 41-44³ |
| | | Pseudomonas aeruginosa | AF148850 | |
| | | | M59181 | |
| | | | X98099 | |
| | | | M33655 | |
| | | | AF148851 | |
| | | | X53433 | |
| | | | L47119 | |
| | | | AF074954 | |
| | | | X53817 | |
| | | | AF096930 | |
| | | | X55640 | |
| | | | Y11069 | |
| | | | U20270 | |
| | | | U92041 | |
| | | | S82452 | |
| | | | X98101 | |
| | | | X98105 | |
| | | | AF164577 | |
| | | | AJ011428 | |
| | | | AF116855 | |
| | | | AB023477 | |
| | | | AF293345 | |
| | | | AF227204 | |
| | | | AF208796 | |
| | | | AF132290 | |
| bla_{TEM}^{5,6} | β-lactams | Enterobacteriaceae, | AF012911 | 37-40³ |
| | | Neisseria sp., | U48775 | |
| | | Haemophilus sp. | AF093512 | |
| | | | AF052748 | |
| | | | X64523 | |
| | | | Y13612 | |
| | | | X57972 | |
| | | | AF157413 | |
| | | | U31280 | |
| | | | U36911 | |
| | | | U48775 | |
| | | | V00613 | |
| | | | X97254 | |
| | | | AJ012256 | |
| | | | X04515 | |
| | | | AF126482 | |
| | | | U09188 | |
| | | | M88143 | |
| | | | Y14574 | |
| | | | AF188200 | |
| | | | AJ251946 | |
| | | | Y17581 | |
| | | | Y17582 | |
| | | | Y17583 | |
| | | | M88143 | |
| | | | U37195 | |
| | | | Y17584 | |
| | | | X64523 | |
| | | | U95363 | |
| | | | Y10279 | |
| | | | Y10280 | |
| | | | Y10281 | |
| | | | AF027199 | |
| | | | AF104441 | |
| | | | AF104442 | |
| | | | AF062386 | |
| | | | X57972 | |
| | | | AF047171 | |
| | | | AF188199 | |
| | | | AF157553 | |
| | | | AF190694 | |
| | | | AF190695 | |
| | | | AF190693 | |
| | | | AF190692 | |
| bla_{CARB}⁵ | β-lactams | Pseudomonas sp., | J05162 | |
| | | Enterobacteriaceae | S46063 | |
| | | | M69058 | |
| | | | U14749 | |
| | | | D86225 | |
| | | | D13210 | |
| | | | Z18955 | |
| | | | AF071555 | |
| | | | AF153200 | |
| | | | AF030945 | |
| bla_{CTX-M-1}⁵ | β-lactams | Enterobacteriaceae | X92506 | |
| bla_{CTX-M-2}⁵ | β-lactams | Enterobacteriaceae | X92507 | |
| bla_{CMY-2}⁷ | β-lactams | Enterobacteriaceae | X91840 | |
| | | | AJ007826 | |
| | | | AJ011293 | |
| | | | AJ011291 | |
| | | | Y17716 | |
| | | | Y16783 | |
| | | | Y16781 | |
| | | | Y15130 | |
| | | | U77414 | |
| | | | S83226 | |
| | | | Y15412 | |
| | | | X78117 | |
| bla_{IMP}⁵ | β-lactams | Enterobacteriaceae, | AJ223604 | |
| | | Pseudomonas aeruginosa | S71932 | |
| | | | D50438 | |
| | | | D29636 | |
| | | | X98393 | |
| | | | AB010417 | |
| | | | D78375 | |
| bla_{PER-1}⁵ | β-lactams | Enterobacteriaceae, | Z21957 | |
| | | Pseudomodanaceae | | |
| bla_{PER-2}⁷ | β-lactams | Enterobacteriaceae | X93314 | |
| blaZ¹² | β-lactams | Enterococcus sp., | | 111⁴ |
| | | Staphylococcus sp. | | |
| mecA¹² | β-lactams | Staphylococcus sp. | | 97-98³ |
| pbp1a¹³ | β-lactams | Streptococcus pneumoniae | M90527 | 1004-1018, |
| | | | X67872 | 1648, 2056-2064, |
| | | | AB006868 | 2273-2276 |
| | | | AB006874 | |
| | | | X67873 | |
| | | | AB006878 | |
| | | | AB006875 | |
| | | | AB006877 | |
| | | | AB006879 | |
| | | | AF046237 | |
| | | | AF046235 | |
| | | | AF026431 | |
| | | | AF046232 | |
| | | | AF046233 | |
| | | | AF046236 | |
| | | | X67871 | |
| | | | Z49095 | |
| | | | AF046234 | |
| | | | AB006873 | |
| | | | X67866 | |
| | | | X67868 | |
| | | | AB006870 | |
| | | | AB006869 | |
| | | | AB006872 | |
| | | | X67870 | |
| | | | AB006871 | |
| | | | X67867 | |
| | | | X67869 | |
| | | | AB006876 | |
| | | | AF046230 | |
| | | | AF046238 | |
| | | | Z49094 | |
| pbp2b¹³ | β-lactams | Streptococcus pneumoniae | X16022 | 1019-1033 |
| | | | M25516 | |
| | | | M25518 | |
| | | | M25515 | |
| | | | U20071 | |
| | | | U20084 | |
| | | | U20082 | |
| | | | U20067 | |
| | | | U20079 | |
| | | | Z22185 | |
| | | | U20072 | |
| pbp2b¹³ | β-lactams | Streptococcus pneumoniae | U20083 | |
| | | | U20081 | |
| | | | M25522 | |
| | | | U20075 | |
| | | | U20070 | |
| | | | U20077 | |
| | | | U20068 | |
| | | | Z22184 | |
| | | | U20069 | |
| | | | U20078 | |
| | | | M25521 | |
| | | | M25525 | |
| | | | M25519 | |
| | | | Z21981 | |
| | | | M25523 | |
| | | | M25526 | |
| | | | U20076 | |
| | | | U20074 | |
| | | | M25520 | |
| | | | M25517 | |
| | | | M25524 | |
| | | | Z22230 | |
| | | | U20073 | |
| | | | U20080 | |
| pbp2x¹³ | β-lactams | Streptococcus pneumoniae | X16367 | 1034-1048 |
| | | | X65135 | |
| | | | AB011204 | |
| | | | AB011209 | |
| | | | AB011199 | |
| | | | AB011200 | |
| | | | AB011201 | |
| | | | AB011202 | |
| | | | AB011198 | |
| | | | AB011208 | |
| | | | AB011205 | |
| | | | AB015852 | |
| | | | AB011210 | |
| | | | AB015849 | |
| | | | AB015850 | |
| | | | AB015851 | |
| | | | AB015847 | |
| | | | AB015846 | |
| | | | AB011207 | |
| | | | AB015848 | |
| | | | Z49096 | |
| int | β-lactams, | Enterobacteriaceae, | | 99-102³ |
| | trimethoprim | | | |
| sul | aminoglycosides, | Pseudomonads | | 103-106³ |
| | antiseptic, | | | |
| | chloramphenicol | | | |
| ermA¹⁴ | Macrolides, | Staphylococcus sp. | | 113⁴ |
| | lincosamides, | | | |
| | streptogramin B | | | |
| ermB¹⁴ | Macrolides, | Enterobacteriaceae, | | 114⁴ |
| | lincosamides, | Staphylococcus sp. | | |
| | streptogramin B | Enterococcus sp. | | |
| | | Streptococcus sp. | | |
| ermC¹⁴ | Macrolides, | Enterobacteriaceae, | | 115⁴ |
| | lincosamides, | Staphylococcus sp. | | |
| | streptogramin B | | | |
| ereA¹² | Macrolides | Enterobacteriaceae, | M11277 | |
| | | Staphylococcus sp. | E01199 | |
| | | | AF099140 | |
| ereB¹² | Macrolides | Enterobacteriaceae | A15097 | |
| | | Staphylococcus sp. | X03988 | |
| msrA¹² | Macrolides | Staphylococcus sp. | | 77-80³ |
| mefA, mefE⁸ | Macrolides | Streptococcus sp. | U70055 | |
| | | | U83667 | |
| mphA⁸ | Macrolides | Enterobacteriaceae, | D16251 | |
| | | Staphylococcus sp. | U34344 | |
| | | | U36578 | |
| linA/linA′⁹ | Lincosamides | Staphylococcus sp. | J03947 | |
| | | | M14039 | |
| | | | A15070 | |
| | | | E01245 | |
| linB¹⁰ | Lincosamides | Enterococcus faecium | AF110130 | |
| | | | AJ238249 | |
| vga¹⁵ | Streptrogramin | Staphylococcus sp. | M90056 | 89-90³ |
| | | | U82085 | |
| vgb¹⁵ | Streptrogramin | Staphylococcus sp. | M36022 | |
| | | | M20219 | |
| | | | AF015628 | |
| vat¹⁵ | Streptrogramin | Staphylococcus sp. | L07778 | 87-88³ |
| vatB¹⁵ | Streptrogramin | Staphylococcus sp. | U19459 | |
| | | | L38809 | |
| satA¹⁵ | Streptrogramin | Enterococcus faecium | L12033 | 81-82³ |
| mupA¹² | Mupirocin | Staphylococcus aureus | X75439 | |
| | | | X59478 | |
| | | | X59477 | |
| gyrA¹⁶ | Quinolones | Gram-positive and | X95718 | 1255, 1607-1608, |
| | | gram-negative bacteria | X06744 | 1764-1776, |
| | | | X57174 | 2013-2014, |
| | | | X16817 | 2277-2280 |
| | | | X71437 | |
| | | | AF065152 | |
| | | | AF060881 | |
| | | | D32252 | |
| parC/grlA¹⁶ | Quinolones | Gram-positive and | AB005036 | 1777-1785 |
| | | gram-negative bacteria | AF056287 | |
| | | | X95717 | |
| | | | AF129764 | |
| | | | AB017811 | |
| | | | AF065152 | |
| parE/grlB¹⁶ | Quinolones | Gram-positive bacteria | X95717 | |
| | | | AF065153 | |
| | | | AF058920 | |
| norA¹⁶ | Quinolones | Staphylococcus sp. | D90119 | |
| | | | M80252 | |
| | | | M97169 | |
| mexR (nalB)¹⁶ | Quinolones | Pseudomonas aeruginosa | U23763 | |
| nfxB¹⁶ | Quinolones | Pseudomonas aeruginosa | X65646 | |
| cat¹² | Chloramphenicol | Gram-positive and | M55620 | |
| | | gram-negative bacteria | X15100 | |
| | | | A24651 | |
| | | | M28717 | |
| | | | A00568 | |
| | | | A00569 | |
| | | | X74948 | |
| | | | Y00723 | |
| | | | A24362 | |
| | | | A00569 | |
| | | | M93113 | |
| | | | M62822 | |
| | | | M58516 | |
| | | | V01277 | |
| | | | X02166 | |
| | | | M77169 | |
| | | | X53796 | |
| | | | J01841 | |
| | | | X07848 | |
| ppflo-like | Chloramphenicol | | AF071555 | |
| embB¹⁷ | Ethambutol | Mycobacterium tuberculosis | U68480 | |
| pncA¹⁷ | Pyrazinamide | Mycobacterium tuberculosis | U59967 | |
| rpoB¹⁷ | Rifampin | Mycobacterium tuberculosis | AF055891 | |
| | | | AF055892 | |
| | | | S71246 | |
| | | | L27989 | |
| | | | AF055893 | |
| inhA¹⁷ | Isoniazid | Mycobacterium tuberculosis | AF106077 | |
| | | | U02492 | |
| vanA¹² | Vancomycin | Enterococcus sp. | | 67-70³ |
| | | | | 1049-1057 |
| vanB¹² | Vancomycin | Enterococcus sp. | | 116⁴ |
| vanC1¹² | Vancomycin | Enterococcus gallinarum | | 117⁴ |
| | | | | 1058-1059 |
| vanC2¹² | Vancomycin | Enterococcus casseliflavus | U94521 | 1060-1063 |
| | | | U94522 | |
| | | | U94523 | |
| | | | U94524 | |
| | | | U94525 | |
| | | | L29638 | |
| vanC3¹² | Vancomycin | Enterococcus flavescens | L29639 | 1064-1066 |
| | | | U72706 | |
| vanD¹⁸ | Vancomycin | Enterococcus faecium | AF130997 | |
| vanE¹² | Vancomycin | Enterococcus faecium | AF136925 | |
| tetB¹⁹ | Tetracycline | Gram-negative bacteria | J01830 | |
| | | | AF162223 | |
| | | | AP000342 | |
| | | | S83213 | |
| | | | U81141 | |
| | | | V00611 | |
| tetM¹⁹ | Tetracycline | Gram-negative and | X52632 | |
| | | Gram-positive bacteria | AF116348 | |
| | | | U50983 | |
| | | | X92947 | |
| | | | M211136 | |
| | | | U08812 | |
| | | | X04388 | |
| sul II²⁰ | Sulfonamides | Gram-negative bacteria | M36657 | |
| | | | AF017389 | |
| | | | AF017391 | |
| dhfrIa²⁰ | Trimethoprim | Gram-negative bacteria | AJ238350 | |
| | | | X17477 | |
| | | | K00052 | |
| | | | U09476 | |
| | | | X00926 | |
| dhfrIb²⁰ | Trimethoprim | Gram-negative bacteria | Z50805 | |
| | | | Z50804 | |
| dhfrV²⁰ | Trimethoprim | Gram-negative bacteria | X12868 | |
| dhfrVI²⁰ | Trimethoprim | Gram-negative bacteria | Z86002 | |
| dhfrVII²⁰ | Trimethoprim | Gram-negative bacteria | U31119 | |
| | | | AF139109 | |
| | | | X58425 | |
| dhfrVIII²⁰ | Trimethoprim | Gram-negative bacteria | U10186 | |
| | | | U09273 | |
| dhfrIX²⁰ | Trimethoprim | Gram-negative bacteria | X57730 | |
| dhfrXII²⁰ | Trimethoprim | Gram-negative bacteria | Z21672 | |
| | | | AF175203 | |
| | | | AF180731 | |
| | | | M84522 | |
| dhfrXIII²⁰ | Trimethoprim | Gram-negative bacteria | Z50802 | |
| dhfrXV²⁰ | Trimethoprim | Gram-negative bacteria | Z83331 | |
| dhfrXVII²⁰ | Trimethoprim | Gram-negative bacteria | AF170088 | |
| | | | AF180469 | |
| | | | AF169041 | |
| dfrA²⁰ | Trimethoprim | Staphylococcus sp. | AF045472 | |
| | | | U40259 | |
| | | | AF051916 | |
| | | | X13290 | |
| | | | Y07536 | |
| | | | Z16422 | |
| | | | Z48233 | |

¹Bacteria having high incidence for the specified antibiotic resistance gene. The presence of the antibiotic resistance genes in other bacteria is not excluded.
²Shaw, K. J., P. N. Rather, R. S. Hare, and G. H. Miller. 1993. Molecular genetics of aminoglycoside resistance genes and familial relationships of the aminoglycoside-modifying enzymes. Microbial. Rev. 57: 138-163.
³Antibiotic resistance genes from our assigned U.S. Pat. No. 6,001,564 for which we have selected PCR primer pairs.
⁴These SEQ ID NOs. refer to a previous patent (publication WO98/20157).
⁵Bush, K., G. A. Jacoby and A. Medeiros. 1995. A functional classification scheme for β-lactamase and its correlation with molecular structure. Antimicrob. Agents. Chemother. 39: 1211-1233.
⁶Nucleotide mutations in bla_{SHV}, bla_{TEM}, and bla_{OXA}, are associated with extended-spectrum β-lactamase or inhibitor-resistant β-lactamase.
⁷Bauerfeind, A., Y. Chong, and K. Lee. 1998. Plasmid-encoded AmpC beta-lactamases: how far have we gone 10 ears after discovery? Yonsei Med. J. 39: 520-525.
⁸Sutcliffe. J., T. Grebe, A. Tait-Kamradt, and L. Wondrack. 1996. Detection of erythromycin-resistant determinants by PCR. Antimicrob. Agent Chemother. 40: 2562-2566.
⁹Leclerc, R., A., Brisson-Noël, J. Duval, and P. Courvalin. 1991. Phenotypic expression and genetic heterogeneity of lincosamide inactivation in Staphylococcus sp. Antimicrob. Agents. Chemother. 31: 1887-1891.
¹⁰Bozdogan, B., L. Berrezouga, M.-S. Kuo, D. A. Yurek, K. A. Farley, B. J. Stockman, and R. Leclercq. 1999. A new gene, linB, conferring resistance to lincosamides by nucleotidylation in Enterococcus faecium HM1025. Antimicrob. Agents. Chemother. 43: 925-929.
¹¹Cockerill III, F. R. 1999. Genetic methods for assessing antimicrobial resistance. Antimicrob. Agents. Chemother. 43: 199-212.
¹²Tenover, F. C., T. Popovic, and O Olsvik. 1996. Genetic methods for detecting antibacterial resistance genes. pp. 1368-1378. In Murray, P. R., E. J. Baron, M. A. Pfaller, F. C. Tenover, R. H. Yolken (eds). Manual of clinical microbiology. 6th ed., ASM Press, Washington, D. C. USA
¹³Dowson, C. G., T. J. Tracey, and B. G. Spratt. 1994. Origin and molecular epidemiology of penicillin-binding-protein-mediated resistance to β-lactam antibiotics. Trends Molec. Microbiol. 2: 361-366.
¹⁴Jensen, L. B., N. Frimodt-Moller, F. M. Aarestrup. 1999. Presence of erm gene classes in Gram-positive bacteria of animal and human origin in Denmark. FEMS Microbiol. 170: 151-158:
¹⁵Thal, L. A., and M. J. Zervos. 1999. Occurrence and epidemiology of resistance to virginimycin and streptrogramins. J. Antimicrob. Chemother. 43: 171-176.
¹⁶Martinez J. L., A. Alonso, J. M. Gomez-Gomez, and F. Baquero. 1998. Quinolone resistance by mutations in chromosomal gyrase genes. Just the tip of the iceberg? J. Antimicrob. Chemother. 42: 683-688
¹⁷Cockerill III, F. R. 1999. Genetic methods for assessing antimicrobial resistance. Antimicrob. Agents. Chemother. 43: 199-212.
¹⁸Casadewall, B. and P. Courvalin. 1999 Characterization of the vanD glycopeptide resistance gene cluster from Enterococcus faecium BM 4339. J. Bacteriol. 181: 3644-3648.
¹⁹Roberts, M. C. 1999. Genetic mobility and distribution of tetracycline resistance determinants. Ciba Found. Symp. 207: 206-222.
²⁰Huovinen, P., L. Sundström, G. Swedberg, and O. Sköld. 1995. Trimethoprim and sulfonamide resistance.Antimicrob. Agent Chemother. 39: 279-289.

TABLE 6
List of bacterial toxins selected for diagnostic purposes.

| Organism | Toxin | Accession number |
|---|---|---|
| Actinobacillus actinomycetemcomitans | Cytolethal distending toxin (cdtA, cdtB, cdtC) | AF006830 |
| | Leukotoxin (ltxA) | M27399 |
| Actinomyces pyogenes | Hemolysin (pyolysin) | U84782 |
| Aeromonas hydrophila | Aerolysin (aerA) | M16495 |
| | Haemolysin (hlyA) | U81555 |
| | Cytotonic enterotoxin (alt) | L77573 |
| Bacillus anthracis | Anthrax toxin (cya) | M23179 |
| Bacillus cereus | Enterotoxin (bceT) | D17312 |
| | | AF192766, AF192767 |
| | Enterotoxic hemolysin BL | AJ237785 |
| | Non-haemolytic enterotoxins A, B and C (nhe) | Y19005 |
| Bacillus mycoides | Hemolytic enterotoxin HBL | AJ243150 to AJ243153 |
| Bacillus pseudomycoides | Hemolytic enterotoxin HBL | AJ243154 to AJ243156 |
| Bacteroides fragilis | Enterotoxin (bftP) | U67735 |
| | Matrix metalloprotease/enterotoxin (fragilysin) | S75941, AF038459 |
| | Metalloprotease toxin-2 | U90931 |
| | | AF081785 |
| | Metalloprotease toxin-3 | AF056297 |
| Bordetella bronchiseptica | Adenylate cyclase hemolysin (cyaA) | Z37112, U22953 |
| | Dermonecrotic toxin (dnt) | U59687 |
| | | AB020025 |
| Bordetella pertussis | Pertussis toxin (S1 subunit, tox) | AJ006151 |
| | | AJ006153 |
| | | AJ006155 |
| | | AJ006157 |
| | | AJ006159 |
| | | AJ007363 |
| | | M14378, M16494 |
| | | AJ007364 |
| | | M13223 |
| | | X16347 |
| | Adenyl cyclase (cya) | 18323 |
| | Dermonecrotic toxin (dnt) | U10527 |
| Campylobacter jejuni | Cytolethal distending toxin (cdtA, cdtB, cdtC) | U51121 |
| Citrobacter freundii | Shiga-like toxin (slt-llcA) | X67514, S53206 |
| Clostridium botulinum | Botulism toxin (BoNT) (A, B, E and F serotypes | X52066, X52088 |
| | are neurotoxic for humans; the other serotypes | X73423 |
| | have not been considered) | M30196 |
| | | X70814 |
| | | X70819 |
| | | X71343 |
| | | Z11934 |
| | | X70817 |
| | | M81186 |
| | | X70818 |
| | | X70815 |
| | | X62089 |
| | | X62683 |
| | | S76749 |
| | | X81714 |
| | | X70816 |
| | | X70820 |
| | | X70281 |
| | | L35496 |
| | | M92906 |
| Clostridium difficile | A toxin (enterotoxin) (tcdA) (cdtA) | AB012304 |
| | | AF053400 |
| | | Y12616 |
| | | X51797 |
| | | X17194 |
| | | M30307 |
| | B toxin (cytotoxin) (toxB) (cdtB) | Z23277 |
| | | X53138 |
| Clostridium perfringens | Alpha (phospholipase C) (cpa) | L43545 |
| | | L43546 |
| | | L43547 |
| | | L43548 |
| | | X13608 |
| | | X17300 |
| | | D10248 |
| | Beta (dermonecrotic protein) (cpb) | L13198 |
| | | X83275 |
| | | L77965 |
| | Enterotoxin (cpe) | AJ000766 |
| | | M98037 |
| | | X81849 |
| | | X71844 |
| | | Y16009 |
| | Enterotoxin pseudogene (not expressed) | AF037328 |
| | | AF037329 |
| | | AF037330 |
| | Epsilon toxin (etxD) | M80837 |
| | | M95206 |
| | | X60694 |
| | Iota (Ia and Ib) | X73562 |
| | Lambda (metalloprotease) | D45904 |
| | Theta (perfringolysin O) | M36704 |
| Clostridium sordellii | Cytotoxin L | X82638 |
| Clostridium tetani | Tetanos toxin | X06214 |
| | | X04436 |
| Corynebacterium diphtheriae | Diphtheriae toxin | X00703 |
| Corynebacterium pseudotuberculosis | Phospholipase C | A21336 |
| Eikenella corrodens | lysine decarboxylase (cadA) | U89166 |
| Enterobacter cloacae | Shiga-like toxin II | Z50754, U33502 |
| Enterococcus faecalis | Cytolysin B (cylB) | M38052 |
| Escherichia coli (EHEC) | Hemolysin toxin (hlyA and ehxA) | AF043471 |
| | | X94129 |
| | | X79839 |
| | | X86087 |
| | | AB011549 |
| | | AF074613 |

TABLE 7
Origin of the nucleic acids and/or sequences in the sequence listing.

| SEQ ID NO. | Archaeal, bacterial, fungal or parasitical species | Source | Gene* |
|---|---|---|---|
| 1 | Acinetobacter baumannii | This patent | tuf |
| 2 | Actinomyces meyeri | This patent | tuf |
| 3 | Aerococcus viridans | This patent | tuf |
| 4 | Achromobacter xylosoxidans subsp. denitrificans | This patent | tuf |
| 5 | Anaerorhabdus furcosus | This patent | tuf |
| 6 | Bacillus anthracis | This patent | tuf |
| 7 | Bacillus cereus | This patent | tuf |
| 8 | Bacteroides distasonis | This patent | tuf |
| 9 | Enterococcus casseliflavus | This patent | tuf |
| 10 | Staphylococcus saprophyticus | This patent | tuf |
| 11 | Bacteroides ovatus | This patent | tuf |
| 12 | Bartonella henselae | This patent | tuf |
| 13 | Bifidobacterium adolescentis | This patent | tuf |
| 14 | Bifidobacterium dentium | This patent | tuf |
| 15 | Brucella abortus | This patent | tuf |
| 16 | Burkholderia cepacia | This patent | tuf |
| 17 | Cedecea davisae | This patent | tuf |
| 18 | Cedecea neteri | This patent | tuf |
| 19 | Cedecea lapagei | This patent | tuf |
| 20 | Chlamydia pneumoniae | This patent | tuf |
| 21 | Chlamydia psittaci | This patent | tuf |
| 22 | Chlamydia trachomatis | This patent | tuf |
| 23 | Chryseobacterium meningosepticum | This patent | tuf |
| 24 | Citrobacter amalonaticus | This patent | tuf |
| 25 | Citrobacter braakii | This patent | tuf |
| 26 | Citrobacter koseri | This patent | tuf |
| 27 | Citrobacter farmeri | This patent | tuf |
| 28 | Citrobacter freundii | This patent | tuf |
| 29 | Citrobacter sedlakii | This patent | tuf |
| 30 | Citrobacter werkmanii | This patent | tuf |
| 31 | Citrobacter youngae | This patent | tuf |
| 32 | Clostridium perfringens | This patent | tuf |
| 33 | Comamonas acidovorans | This patent | tuf |
| 34 | Corynebacterium bovis | This patent | tuf |
| 35 | Corynebacterium cervicis | This patent | tuf |
| 36 | Corynebacterium flavescens | This patent | tuf |
| 37 | Corynebacterium kutscheri | This patent | tuf |
| 38 | Corynebacterium minutissimum | This patent | tuf |
| 39 | Corynebacterium mycetoides | This patent | tuf |
| 40 | Corynebacterium pseudogenitalium | This patent | tuf |
| 41 | Corynebacterium renale | This patent | tuf |
| 42 | Corynebacterium ulcerans | This patent | tuf |
| 43 | Corynebacterium urealyticum | This patent | tuf |
| 44 | Corynebacterium xerosis | This patent | tuf |
| 45 | Coxiella burnetii | This patent | tuf |
| 46 | Edwardsiella hoshinae | This patent | tuf |
| 47 | Edwardsiella tarda | This patent | tuf |
| 48 | Eikenella corrodens | This patent | tuf |
| 49 | Enterobacter aerogenes | This patent | tuf |
| 50 | Enterobacter agglomerans | This patent | tuf |
| 51 | Enterobacter amnigenus | This patent | tuf |
| 52 | Enterobacter asburiae | This patent | tuf |
| 53 | Enterobacter cancerogenus | This patent | tuf |
| 54 | Enterobacter cloacae | This patent | tuf |
| 55 | Enterobacter gergoviae | This patent | tuf |
| 56 | Enterobacter hormaechei | This patent | tuf |
| 57 | Enterobacter sakazakii | This patent | tuf |
| 58 | Enterococcus casseliflavus | This patent | tuf |
| 59 | Enterococcus cecorum | This patent | tuf |
| 60 | Enterococcus dispar | This patent | tuf |
| 61 | Enterococcus durans | This patent | tuf |
| 62 | Enterococcus faecalis | This patent | tuf |
| 63 | Enterococcus faecalis | This patent | tuf |
| 64 | Enterococcus faecium | This patent | tuf |
| 65 | Enterococcus flavescens | This patent | tuf |
| 66 | Enterococcus gallinarum | This patent | tuf |
| 67 | Enterococcus hirae | This patent | tuf |
| 68 | Enterococcus mundtii | This patent | tuf |
| 69 | Enterococcus pseudoavium | This patent | tuf |
| 70 | Enterococcus raffinosus | This patent | tuf |
| 71 | Enterococcus saccharolyticus | This patent | tuf |
| 72 | Enterococcus solitarius | This patent | tuf |
| 73 | Enterococcus casseliflavus | This patent | tuf (C) |
| 74 | Staphylococcus saprophyticus | This patent | unknown |
| 75 | Enterococcus flavescens | This patent | tuf (C) |
| 76 | Enterococcus gallinarum | This patent | tuf (C) |
| 77 | Ehrlichia canis | This patent | tuf |
| 78 | Escherichia coli | This patent | tuf |
| 79 | Escherichia fergusonii | This patent | tuf |
| 80 | Escherichia hermannii | This patent | tuf |
| 81 | Escherichia vulneris | This patent | tuf |
| 82 | Eubacterium lentum | This patent | tuf |
| 83 | Eubacterium nodatum | This patent | tuf |
| 84 | Ewingella americana | This patent | tuf |
| 85 | Francisella tularensis | This patent | tuf |
| 86 | Fusobacterium nucleatum subsp. polymorphum | This patent | tuf |
| 87 | Gemella haemolysans | This patent | tuf |
| 88 | Gemella morbillorum | This patent | tuf |
| 89 | Haemophilus actinomycetemcomitans | This patent | tuf |
| 90 | Haemophilus aphrophilus | This patent | tuf |
| 91 | Haemophilus ducreyi | This patent | tuf |
| 92 | Haemophilus haemolyticus | This patent | tuf |
| 93 | Haemophilus parahaemolyticus | This patent | tuf |
| 94 | Haemophilus parainfluenzae | This patent | tuf |
| 95 | Haemophilus paraphrophilus | This patent | tuf |
| 96 | Haemophilus segnis | This patent | tuf |
| 97 | Hafnia alvei | This patent | tuf |
| 98 | Kingella kingae | This patent | tuf |
| 99 | Klebsiella omithinolytica | This patent | tuf |
| 100 | Klebsiella oxytoca | This patent | tuf |
| 101 | Klebsiella planticola | This patent | tuf |
| 102 | Klebsiella pneumoniae subsp. ozaenae | This patent | tuf |
| 103 | Klebsiella pneumoniae pneumoniae | This patent | tuf |
| 104 | Klebsiella pneumoniae subsp. rhinoscleromatis | This patent | tuf |
| 105 | Kluyvera ascorbata | This patent | tuf |
| 106 | Kluyvera cryocrescens | This patent | tuf |
| 107 | Kluyvera georgiana | This patent | tuf |
| 108 | Lactobacillus casei subsp. casei | This patent | tuf |
| 109 | Lactococcus lactis subsp. lactis | This patent | tuf |
| 110 | Leclercia adecarboxylata | This patent | tuf |
| 111 | Legionella micdadei | This patent | tuf |
| 112 | Legionella pneumophila subsp. pneumophila | This patent | tuf |
| 113 | Leminorella grimontii | This patent | tuf |
| 114 | Leminorella richardii | This patent | tuf |
| 115 | Leptospira interrogans | This patent | tuf |
| 116 | Megamonas hypermegale | This patent | tuf |
| 117 | Mitsuokella multacidus | This patent | tuf |
| 118 | Mobiluncus curtisii subsp. holmesii | This patent | tuf |
| 119 | Moellerella wisconsensis | This patent | tuf |
| 120 | Moraxella catarrhalis | This patent | tuf |
| 121 | Morganella morganii subsp. morganii | This patent | tuf |
| 122 | Mycobacterium tuberculosis | This patent | tuf |
| 123 | Neisseria cinerea | This patent | tuf |
| 124 | Neisseria elongata subsp. elongata | This patent | tuf |
| 125 | Neisseria flavescens | This patent | tuf |
| 126 | Neisseria gonorrhoeae | This patent | tuf |
| 127 | Neisseria lactamica | This patent | tuf |
| 128 | Neisseria meningitidis | This patent | tuf |
| 129 | Neisseria mucosa | This patent | tuf |
| 130 | Neisseria sicca | This patent | tuf |
| 131 | Neisseria subflava | This patent | tuf |
| 132 | Neisseria weaveri | This patent | tuf |
| 133 | Ochrobactrum anthropi | This patent | tuf |
| 134 | Pantoea agglomerans | This patent | tuf |
| 135 | Pantoea dispersa | This patent | tuf |
| 136 | Pasteurella multocida | This patent | tuf |
| 137 | Peptostreptococcus anaerobius | This patent | tuf |
| 138 | Peptostreptococcus asaccharolyticus | This patent | tuf |
| 139 | Peptostreptococcus prevotii | This patent | tuf |
| 140 | Porphyromonas asaccharolytica | This patent | tuf |
| 141 | Porphyromonas gingivalis | This patent | tuf |
| 142 | Pragia fontium | This patent | tuf |
| 143 | Prevotella melaninogenica | This patent | tuf |
| 144 | Prevotella oralis | This patent | tuf |
| 145 | Propionibacterium acnes | This patent | tuf |
| 146 | Proteus mirabilis | This patent | tuf |
| 147 | Proteus penneri | This patent | tuf |
| 148 | Proteus vulgaris | This patent | tuf |
| 149 | Providencia alcalifaciens | This patent | tuf |
| 150 | Providencia rettgeri | This patent | tuf |
| 151 | Providencia rustigianii | This patent | tuf |
| 152 | Providencia stuartii | This patent | tuf |
| 153 | Pseudomonas aeruginosa | This patent | tuf |
| 154 | Pseudomonas fluorescens | This patent | tuf |
| 155 | Pseudomonas stutzeri | This patent | tuf |
| 156 | Psychrobacter phenylpyruvicum | This patent | tuf |
| 157 | Rahnella aquatilis | This patent | tuf |
| 158 | Salmonella choleraesuis subsp. arizonae | This patent | tuf |
| 159 | Salmonella choleraesuis subsp. choleraesuis | This patent | tuf |
| | serotype Choleraesuis | | |
| 160 | Salmonella choleraesuis subsp. diarizonae | This patent | tuf |
| 161 | Salmonella choleraesuis subsp. choleraesuis | This patent | tuf |
| | serotype Heidelberg | | |
| 162 | Salmonella choleraesuis subsp. houtenae | This patent | tuf |
| 163 | Salmonella choleraesuis subsp. indica | This patent | tuf |
| 164 | Salmonella choleraesuis subsp. salamae | This patent | tuf |
| 165 | Salmonella choleraesuis subsp. choleraesuis serotype Typhi | This patent | tuf |
| 166 | Serratia fonticola | This patent | tuf |
| 167 | Serratia liquefaciens | This patent | tuf |
| 168 | Serratia marcescens | This patent | tuf |
| 169 | Serratia odorifera | This patent | tuf |
| 170 | Serratia plymuthica | This patent | tuf |
| 171 | Serratia rubidaea | This patent | tuf |
| 172 | Shigella boydii | This patent | tuf |
| 173 | Shigella dysenteriae | This patent | tuf |
| 174 | Shigella flexneri | This patent | tuf |
| 175 | Shigella sonnei | This patent | tuf |
| 176 | Staphylococcus aureus | This patent | tuf |
| 177 | Staphylococcus aureus | This patent | tuf |
| 178 | Staphylococcus aureus | This patent | tuf |
| 179 | Staphylococcus aureus | This patent | tuf |
| 180 | Staphylococcus aureus subsp. aureus | This patent | tuf |
| 181 | Staphylococcus auricularis | This patent | tuf |
| 182 | Staphylococcus capitis subsp. capitis | This patent | tuf |
| 183 | Macrococcus caseolyticus | This patent | tuf |
| 184 | Staphylococcus cohnii subsp. cohnii | This patent | tuf |
| 185 | Staphylococcus epidermidis | This patent | tuf |
| 186 | Staphylococcus haemolyticus | This patent | tuf |
| 187 | Staphylococcus warneri | This patent | tuf |
| 188 | Staphylococcus haemolyticus | This patent | tuf |
| 189 | Staphylococcus haemolyticus | This patent | tuf |
| 190 | Staphylococcus haemolyticus | This patent | tuf |
| 191 | Staphylococcus hominis subsp. hominis | This patent | tuf |
| 192 | Staphylococcus warneri | This patent | tuf |
| 193 | Staphylococcus hominis | This patent | tuf |
| 194 | Staphylococcus hominis | This patent | tuf |
| 195 | Staphylococcus hominis | This patent | tuf |
| 196 | Staphylococcus hominis | This patent | tuf |
| 197 | Staphylococcus lugdunensis | This patent | tuf |
| 198 | Staphylococcus saprophyticus | This patent | tuf |
| 199 | Staphylococcus saprophyticus | This patent | tuf |
| 200 | Staphylococcus saprophyticus | This patent | tuf |
| 201 | Staphylococcus sciuri subsp. sciuri | This patent | tuf |
| 202 | Staphylococcus warneri | This patent | tuf |
| 203 | Staphylococcus warneri | This patent | tuf |
| 204 | Bifidobacterium longum | This patent | tuf |
| 205 | Stenotrophomonas maltophilia | This patent | tuf |
| 206 | Streptococcus acidominimus | This patent | tuf |
| 207 | Streptococcus agalactiae | This patent | tuf |
| 208 | Streptococcus agalactiae | This patent | tuf |
| 209 | Streptococcus agalactiae | This patent | tuf |
| 210 | Streptococcus agalactiae | This patent | tuf |
| 211 | Streptococcus anginosus | This patent | tuf |
| 212 | Streptococcus bovis | This patent | tuf |
| 213 | Streptococcus anginosus | This patent | tuf |
| 214 | Streptococcus cricetus | This patent | tuf |
| 215 | Streptococcus cristatus | This patent | tuf |
| 216 | Streptococcus downei | This patent | tuf |
| 217 | Streptococcus dysgalactiae | This patent | tuf |
| 218 | Streptococcus equi subsp. equi | This patent | tuf |
| 219 | Streptococcus ferus | This patent | tuf |
| 220 | Streptococcus gordonii | This patent | tuf |
| 221 | Streptococcus anginosus | This patent | tuf |
| 222 | Streptococcus macacae | This patent | tuf |
| 223 | Streptococcus gordonii | This patent | tuf |
| 224 | Streptococcus mutans | This patent | tuf |
| 225 | Streptococcus parasanguinis | This patent | tuf |
| 226 | Streptococcus ratti | This patent | tuf |
| 227 | Streptococcus sanguinis | This patent | tuf |
| 228 | Streptococcus sobrinus | This patent | tuf |
| 229 | Streptococcus suis | This patent | tuf |
| 230 | Streptococcus uberis | This patent | tuf |
| 231 | Streptococcus vestibularis | This patent | tuf |
| 232 | Tatumella ptyseos | This patent | tuf |
| 233 | Trabulsiella guamensis | This patent | tuf |
| 234 | Veillonella parvula | This patent | tuf |
| 235 | Yersinia enterocolitica | This patent | tuf |
| 236 | Yersinia frederiksenii | This patent | tuf |
| 237 | Yersinia intermedia | This patent | tuf |
| 238 | Yersinia pestis | This patent | tuf |
| 239 | Yersinia pseudotuberculosis | This patent | tuf |
| 240 | Yersinia rohdei | This patent | tuf |
| 241 | Yokenella regensburgei | This patent | tuf |
| 242 | Achromobacter xylosoxidans subsp. denitrificans | This patent | atpD |
| 243 | Acinetobacter baumannii | This patent | atpD |
| 244 | Acinetobacter lwoffii | This patent | atpD |
| 245 | Staphylococcus saprophyticus | This patent | atpD |
| 246 | Alcaligenes faecalis subsp. faecalis | This patent | atpD |
| 247 | Bacillus anthracis | This patent | atpD |
| 248 | Bacillus cereus | This patent | atpD |
| 249 | Bacteroides distasonis | This patent | atpD |
| 250 | Bacteroides ovatus | This patent | atpD |
| 251 | Leclercia adecarboxylata | This patent | atpD |
| 252 | Stenotrophomonas maltophilia | This patent | atpD |
| 253 | Bartonella henselae | This patent | atpD |
| 254 | Bifidobacterium adolescentis | This patent | atpD |
| 255 | Brucella abortus | This patent | atpD |
| 256 | Cedecea davisae | This patent | atpD |
| 257 | Cedecea lapagei | This patent | atpD |
| 258 | Cedecea neteri | This patent | atpD |
| 259 | Chryseobacterium meningosepticum | This patent | atpD |
| 260 | Citrobacter amalonaticus | This patent | atpD |
| 261 | Citrobacter braakii | This patent | atpD |
| 262 | Citrobacter koseri | This patent | atpD |
| 263 | Citrobacter farmeri | This patent | atpD |
| 264 | Citrobacter freundii | This patent | atpD |
| 265 | Citrobacter koseri | This patent | atpD |
| 266 | Citrobacter sedlakii | This patent | atpD |
| 267 | Citrobacter werkmanii | This patent | atpD |
| 268 | Citrobacter youngae | This patent | atpD |
| 269 | Clostridium innocuum | This patent | atpD |
| 270 | Clostridium perfringens | This patent | atpD |
| 272 | Corynebacterium diphtheriae | This patent | atpD |
| 273 | Corynebacterium pseudodiphtheriticum | This patent | atpD |
| 274 | Corynebacterium ulcerans | This patent | atpD |
| 275 | Corynebacterium urealyticum | This patent | atpD |
| 276 | Coxiella burnetii | This patent | atpD |
| 277 | Edwardsiella hoshinae | This patent | atpD |
| 278 | Edwardsiella tarda | This patent | atpD |
| 279 | Eikenella corrodens | This patent | atpD |
| 280 | Enterobacter agglomerans | This patent | atpD |
| 281 | Enterobacter arnnigenus | This patent | atpD |
| 282 | Enterobacter asburiae | This patent | atpD |
| 283 | Enterobacter cancerogenus | This patent | atpD |
| 284 | Enterobacter cloacae | This patent | atpD |
| 285 | Enterobacter gergoviae | This patent | atpD |
| 286 | Enterobacter hormaechei | This patent | atpD |
| 287 | Enterobacter sakazakii | This patent | atpD |
| 288 | Enterococcus avium | This patent | atpD |
| 289 | Enterococcus casseliflavus | This patent | atpD |
| 290 | Enterococcus durans | This patent | atpD |
| 291 | Enterococcus faecalis | This patent | atpD |
| 292 | Enterococcus faecium | This patent | atpD |
| 293 | Enterococcus gallinarum | This patent | atpD |
| 294 | Enterococcus saccharolyticus | This patent | atpD |
| 295 | Escherichia fergusonii | This patent | atpD |
| 296 | Escherichia hermannii | This patent | atpD |
| 297 | Escherichia vulneris | This patent | atpD |
| 298 | Eubacterium lentum | This patent | atpD |
| 299 | Ewingella americana | This patent | atpD |
| 300 | Francisella tularensis | This patent | atpD |
| 301 | Fusobacterium gonidiaformans | This patent | atpD |
| 302 | Fusobacterium necrophorum subsp. necrophorum | This patent | atpD |
| 303 | Fusobacterium nucleatum subsp. polymorphum | This patent | atpD |
| 304 | Gardnerella vaginalis | This patent | atpD |
| 305 | Gemella haemolysans | This patent | atpD |
| 306 | Gemella morbillorum | This patent | atpD |
| 307 | Haemophilus ducreyi | This patent | atpD |
| 308 | Haemophilus haemolyticus | This patent | atpD |
| 309 | Haemophilus parahaemolyticus | This patent | atpD |
| 310 | Haemophilus parainfluenzae | This patent | atpD |
| 311 | Hafnia alvei | This patent | atpD |
| 312 | Kingella kingae | This patent | atpD |
| 313 | Klebsiella pneumoniae subsp. ozaenae | This patent | atpD |
| 314 | Klebsiella omithinolytica | This patent | atpD |
| 315 | Klebsiella oxytoca | This patent | atpD |
| 316 | Klebsiella planticola | This patent | atpD |
| 317 | Klebsiella pneumoniae subsp. pneumoniae | This patent | atpD |
| 318 | Kluyvera ascorbata | This patent | atpD |
| 319 | Kluyvera cryocrescens | This patent | atpD |
| 320 | Kluyvera georgiana | This patent | atpD |
| 321 | Lactobacillus acidophilus | This patent | atpD |
| 322 | Legionella pneumophila subsp. pneumophila | This patent | atpD |
| 323 | Leminorella grimontii | This patent | atpD |
| 324 | Listeria monocytogenes | This patent | atpD |
| 325 | Micrococcus lylae | This patent | atpD |
| 326 | Moellerella wisconsensis | This patent | atpD |
| 327 | Moraxella catarrhalis | This patent | atpD |
| 328 | Moraxella osloensis | This patent | atpD |
| 329 | Morganella morganii subsp. morganii | This patent | atpD |
| 330 | Pantoea agglomerans | This patent | atpD |
| 331 | Pantoea dispersa | This patent | atpD |
| 332 | Pasteurella multocida | This patent | atpD |
| 333 | Pragia fontium | This patent | atpD |
| 334 | Proteus mirabilis | This patent | atpD |
| 335 | Proteus vulgaris | This patent | atpD |
| 336 | Providencia alcalifaciens | This patent | atpD |
| 337 | Providencia rettgeri | This patent | atpD |
| 338 | Providencia rustigianii | This patent | atpD |
| 339 | Providencia stuartii | This patent | atpD |
| 340 | Psychrobacter phenylpyruvicum | This patent | atpD |
| 341 | Rahnella aquatilis | This patent | atpD |
| 342 | Salmonella choleraesuis subsp. arizonae | This patent | atpD |
| 343 | Salmonella choleraesuis subsp. choleraesuis | This patent | atpD |
| | serotype Choleraesuis | | |
| 344 | Salmonella choleraesuis subsp. diarizonae | This patent | atpD |
| 345 | Salmonella choleraesuis subsp. houtenae | This patent | atpD |
| 346 | Salmonella choleraesuis subsp. indica | This patent | atpD |
| 347 | Salmonella choleraesuis subsp. choleraesuis | This patent | atpD |
| | serotype Paratyphi A | | |
| 348 | Salmonella choleraesuis subsp. choleraesuis | This patent | atpD |
| | serotype Paratyphi B | | |
| 349 | Salmonella choleraesuis subsp. salamae | This patent | atpD |
| 350 | Salmonella choleraesuis subsp. choleraesuis serotype Typhi | This patent | atpD |
| 351 | Salmonella choleraesuis subsp. choleraesuis | This patent | atpD |
| | serotype Typhimurium | | |
| 352 | Salmonella choleraesuis subsp. choleraesuis | This patent | atpD |
| | serotype Virchow | | |
| 353 | Serratia ficaria | This patent | atpD |
| 354 | Serratia fonticola | This patent | atpD |
| 355 | Serratia grimesii | This patent | atpD |
| 356 | Serratia liquefaciens | This patent | atpD |
| 357 | Serratia marcescens | This patent | atpD |
| 358 | Serratia odorifera | This patent | atpD |
| 359 | Serratia plymuthica | This patent | atpD |
| 360 | Serratia rubidaea | This patent | atpD |
| 361 | Pseudomonas putida | This patent | atpD |
| 362 | Shigella boydii | This patent | atpD |
| 363 | Shigella dysenteriae | This patent | atpD |
| 364 | Shigella flexneri | This patent | atpD |
| 365 | Shigella sonnei | This patent | atpD |
| 366 | Staphylococcus aureus | This patent | atpD |
| 367 | Staphylococcus auricularis | This patent | atpD |
| 368 | Staphylococcus capitis subsp. capitis | This patent | atpD |
| 369 | Staphylococcus cohnii subsp. cohnii | This patent | atpD |
| 370 | Staphylococcus epidermidis | This patent | atpD |
| 371 | Staphylococcus haemolyticus | This patent | atpD |
| 372 | Staphylococcus hominis subsp. hominis | This patent | atpD |
| 373 | Staphylococcus hominis | This patent | atpD |
| 374 | Staphylococcus lugdunensis | This patent | atpD |
| 375 | Staphylococcus saprophyticus | This patent | atpD |
| 376 | Staphylococcus simulans | This patent | atpD |
| 377 | Staphylococcus wameri | This patent | atpD |
| 378 | Streptococcus acidominimus | This patent | atpD |
| 379 | Streptococcus agalactiae | This patent | atpD |
| 380 | Streptococcus agalactiae | This patent | atpD |
| 381 | Streptococcus agalactiae | This patent | atpD |
| 382 | Streptococcus agalactiae | This patent | atpD |
| 383 | Streptococcus agalactiae | This patent | atpD |
| 384 | Streptococcus dysgalactiae | This patent | atpD |
| 385 | Streptococcus equi subsp. equi | This patent | atpD |
| 386 | Streptococcus anginosus | This patent | atpD |
| 387 | Streptococcus salivarius | This patent | atpD |
| 388 | Streptococcus suis | This patent | atpD |
| 389 | Streptococcus uberis | This patent | atpD |
| 390 | Tatumella ptyseos | This patent | atpD |
| 391 | Trabulsiella guamensis | This patent | atpD |
| 392 | Yersinia bercovieri | This patent | atpD |
| 393 | Yersinia enterocolitica | This patent | atpD |
| 394 | Yersinia frederiksenii | This patent | atpD |
| 395 | Yersinia intermedia | This patent | atpD |
| 396 | Yersinia pseudotuberculosis | This patent | atpD |
| 397 | Yersinia rohdei | This patent | atpD |
| 398 | Yokenella regensburgei | This patent | atpD |
| 399 | Yarrowia lipolytica | This patent | tuf (EF-1) |
| 400 | Absidia corymbifera | This patent | tuf (EF-1) |
| 401 | Alternaria alternata | This patent | tuf (EF-1) |
| 402 | Aspergillus flavus | This patent | tuf (EF-1) |
| 403 | Aspergillus fumigatus | This patent | tuf (EF-1) |
| 404 | Aspergillus fumigatus | This patent | tuf (EF-1) |
| 405 | Aspergillus niger | This patent | tuf (EF-1) |
| 406 | Blastoschizomyces capitatus | This patent | tuf (EF-1) |
| 407 | Candida albicans | This patent | tuf (EF-1) |
| 408 | Candida albicans | This patent | tuf (EF-1) |
| 409 | Candida albicans | This patent | tuf (EF-1) |
| 410 | Candida albicans | This patent | tuf (EF-1) |
| 411 | Candida albicans | This patent | tuf (EF-1) |
| 412 | Candida dubliniensis | This patent | tuf (EF-1) |
| 413 | Candida catenulata | This patent | tuf (EF-1) |
| 414 | Candida dubliniensis | This patent | tuf (EF-1) |
| 415 | Candida dubliniensis | This patent | tuf (EF-1) |
| 416 | Candida famata | This patent | tuf (EF-1) |
| 417 | Candida glabrata | WO98/20157 | tuf (EF-1) |
| 418 | Candida guilliermondii | This patent | tuf (EF-1) |
| 419 | Candida haemulonii | This patent | tuf (EF-1) |
| 420 | Candida inconspicua | This patent | tuf (EF-1) |
| 421 | Candida kefyr | This patent | tuf (EF-1) |
| 422 | Candida krusei | WO98/20157 | tuf (EF-1) |
| 423 | Candida lambica | This patent | tuf (EF-1) |
| 424 | Candida lusitaniae | This patent | tuf (EF-1) |
| 425 | Candida norvegensis | This patent | tuf (EF-1) |
| 426 | Candida parapsilosis | WO98/20157 | tuf (EF-1) |
| 427 | Candida rugosa | This patent | tuf (EF-1) |
| 428 | Candida sphaerica | This patent | tuf (EF-1) |
| 429 | Candida tropicalis | WO98/20157 | tuf (EF-1) |
| 430 | Candida utilis | This patent | tuf (EF-1) |
| 431 | Candida viswanathii | This patent | tuf (EF-1) |
| 432 | Candida zeylanoides | This patent | tuf (EF-1) |
| 433 | Coccidioides immitis | This patent | tuf (EF-1) |
| 434 | Cryptococcus albidus | This patent | tuf (EF-1) |
| 435 | Exophiala jeanselmei | This patent | tuf (EF-1) |
| 436 | Fusarium oxysporum | This patent | tuf (EF-1) |
| 437 | Geotrichum sp. | This patent | tuf (EF-1) |
| 438 | Histoplasma capsulatum | This patent | tuf (EF-1) |
| 439 | Issatchenkia orientalis Kudrjanzev | This patent | tuf (EF-1) |
| 440 | Malassezia furfur | This patent | tuf (EF-1) |
| 441 | Malassezia pachydermatis | This patent | tuf (EF-1) |
| 442 | Malbranchea filamentosa | This patent | tuf (EF-1) |
| 443 | Metschnikowia pulcherrima | This patent | tuf (EF-1) |
| 444 | Paecilomyces lilacinus | This patent | tuf (EF-1) |
| 445 | Paracoccidioides brasiliensis | This patent | tuf (EF-1) |
| 446 | Penicillium marneffei | This patent | tuf (EF-1) |
| 447 | Pichia anomala | This patent | tuf (EF-1) |
| 448 | Pichia anomala | This patent | tuf (EF-1) |
| 449 | Pseudallescheria boydii | This patent | tuf (EF-1) |
| 450 | Rhizopus oryzae | This patent | tuf (EF-1) |
| 451 | Rhodotorula minuta | This patent | tuf (EF-1) |
| 452 | Sporobolomyces salmonicolor | This patent | tuf (EF-1) |
| 453 | Sporothrix schenckii | This patent | tuf (EF-1) |
| 454 | Stephanoascus ciferrii | This patent | tuf (EF-1) |
| 455 | Trichophyton mentagrophytes | This patent | tuf (EF-1) |
| 456 | Trichosporon cutaneum | This patent | tuf (EF-1) |
| 457 | Wangiella dermatitidis | This patent | tuf (EF-1) |
| 458 | Aspergillus fumigatus | This patent | atpD |
| 459 | Blastoschizomyces capitatus | This patent | atpD |
| 460 | Candida albicans | This patent | atpD |
| 461 | Candida dubliniensis | This patent | atpD |
| 462 | Candida famata | This patent | atpD |
| 463 | Candida glabrata | This patent | atpD |
| 464 | Candida guilliermondii | This patent | atpD |
| 465 | Candida haemulonii | This patent | atpD |
| 466 | Candida inconspicua | This patent | atpD |
| 467 | Candida kefyr | This patent | atpD |
| 468 | Candida krusei | This patent | atpD |
| 469 | Candida lambica | This patent | atpD |
| 470 | Candida lusitaniae | This patent | atpD |
| 471 | Candida norvegensis | This patent | atpD |
| 472 | Candida parapsilosis | This patent | atpD |
| 473 | Candida rugosa | This patent | atpD |
| 474 | Candida sphaerica | This patent | atpD |
| 475 | Candida tropicalis | This patent | atpD |
| 476 | Candida utilis | This patent | atpD |
| 477 | Candida viswanathii | This patent | atpD |
| 478 | Candida zeylanoides | This patent | atpD |
| 479 | Coccidioides immitis | This patent | atpD |
| 480 | Cryptococcus albidus | This patent | atpD |
| 481 | Fusarium oxysporum | This patent | atpD |
| 482 | Geotrichum sp. | This patent | atpD |
| 483 | Histoplasma capsulatum | This patent | atpD |
| 484 | Malassezia furfur | This patent | atpD |
| 485 | Malassezia pachydermatis | This patent | atpD |
| 486 | Metschnikowia pulcherrima | This patent | atpD |
| 487 | Penicillium mameffei | This patent | atpD |
| 488 | Pichia anomala | This patent | atpD |
| 489 | Pichia anomala | This patent | atpD |
| 490 | Rhodotorula minuta | This patent | atpD |
| 491 | Rhodotorula mucilaginosa | This patent | atpD |
| 492 | Sporobolomyces salmonicolor | This patent | atpD |
| 493 | Sporothrix schenckii | This patent | atpD |
| 494 | Stephanoascus ciferrii | This patent | atpD |
| 495 | Trichophyton mentagrophytes | This patent | atpD |
| 496 | Wangiella dermatitidis | This patent | atpD |
| 497 | Yarrowia lipolytica | This patent | atpD |
| 498 | Aspergillus fumigatus | This patent | tuf (M) |
| 499 | Blastoschizomyces capitatus | This patent | tuf (M) |
| 500 | Candida rugosa | This patent | tuf (M) |
| 501 | Coccidioides immitis | This patent | tuf (M) |
| 502 | Fusarium oxysporum | This patent | tuf (M) |
| 503 | Histoplasma capsulatum | This patent | tuf (M) |
| 504 | Paracoccidioides brasiliensis | This patent | tuf (M) |
| 505 | Penicillium marneffei | This patent | tuf (M) |
| 506 | Pichia anomala | This patent | tuf (M) |
| 507 | Trichophyton mentagrophytes | This patent | tuf (M) |
| 508 | Yarrowia lipolytica | This patent | tuf (M) |
| 509 | Babesia bigemina | This patent | tuf (EF-1) |
| 510 | Babesia bovis | This patent | tuf (EF-1) |
| 511 | Crithidia fasciculata | This patent | tuf (EF-1) |
| 512 | Entamoeba histolytica | This patent | tuf (EF-1) |
| 513 | Giardia lamblia | This patent | tuf (EF-1) |
| 514 | Leishmania tropica | This patent | tuf (EF-1) |
| 515 | Leishmania aethiopica | This patent | tuf (EF-1) |
| 516 | Leishmania tropica | This patent | tuf (EF-1) |
| 517 | Leishmania donovani | This patent | tuf (EF-1) |
| 518 | Leishmania infantum | This patent | tuf (EF-1) |
| 519 | Leishmania enriettii | This patent | tuf (EF-1) |
| 520 | Leishmania gerbilli | This patent | tuf (EF-1) |
| 521 | Leishmania hertigi | This patent | tuf (EF-1) |
| 522 | Leishmania major | This patent | tuf (EF-1) |
| 523 | Leishmania amazonensis | This patent | tuf (EF-1) |
| 524 | Leishmania mexicana | This patent | tuf (EF-1) |
| 525 | Leishmania tarentolae | This patent | tuf (EF-1) |
| 526 | Leishmania tropica | This patent | tuf (EF-1) |
| 527 | Neospora caninum | This patent | tuf (EF-1) |
| 528 | Trichomonas vaginalis | This patent | tuf (EF-1) |
| 529 | Trypanosoma brucei subsp. brucei | This patent | tuf (EF-1) |
| 530 | Crithidia fasciculata | This patent | atpD |
| 531 | Leishmania tropica | This patent | atpD |
| 532 | Leishmania aethiopica | This patent | atpD |
| 533 | Leishmania donovani | This patent | atpD |
| 534 | Leishmania infantum | This patent | atpD |
| 535 | Leishmania gerbilli | This patent | atpD |
| 536 | Leishmania hertigi | This patent | atpD |
| 537 | Leishmania major | This patent | atpD |
| 538 | Leishmania amazonensis | This patent | atpD |
| 607 | Enterococcus faecalis | WO98/20157 | tuf |
| 608 | Enterococcus faecium | WO98/20157 | tuf |
| 609 | Enterococcus gallinarum | WO98/20157 | tuf |
| 610 | Haemophilus influenzae | WO98/20157 | tuf |
| 611 | Staphylococcus epidermidis | WO98/20157 | tuf |
| 612 | Salmonella choleraesuis subsp. choleraesuis | This patent | tuf |
| | serotype Paratyphi A | | |
| 613 | Serratia ficaria | This patent | tuf |
| 614 | Enterococcus malodoratus | This patent | tuf (C) |
| 615 | Enterococcus durans | This patent | tuf (C) |
| 616 | Enterococcus pseudoavium | This patent | tuf (C) |
| 617 | Enterococcus dispar | This patent | tuf (C) |
| 618 | Enterococcus avium | This patent | tuf (C) |
| 619 | Saccharomyces cerevisiae | Database | tuf (M) |
| 621 | Enterococcus faecium | This patent | tuf (C) |
| 622 | Saccharomyces cerevisiae | This patent | tuf (EF-1) |
| 623 | Cryptococcus neoformans | This patent | tuf (EF-1) |
| 624 | Candida albicans | WO98/20157 | tuf (EF-1) |
| 662 | Corynebacterium diphtheriae | WO98/20157 | tuf |
| 663 | Candida catenulata | This patent | atpD |
| 665 | Saccharomyces cerevisiae | Database | tuf (EF-1) |
| 666 | Saccharomyces cerevisiae | Database | atpD |
| 667 | Trypanosoma cruzi | This patent | atpD |
| 668 | Corynebacterium glutamicum | Database | tuf |
| 669 | Escherichia coli | Database | atpD |
| 670 | Helicobacter pylori | Database | atpD |
| 671 | Clostridium acetobutylicum | Database | atpD |
| 672 | Cytophaga lytica | Database | atpD |
| 673 | Ehrlichia risticii | This patent | atpD |
| 674 | Vibrio cholerae | This patent | atpD |
| 675 | Vibrio cholerae | This patent | tuf |
| 676 | Leishmania enriettii | This patent | atpD |
| 677 | Babesia microti | This patent | tuf (EF-1) |
| 678 | Cryptococcus neoformans | This patent | atpD |
| 679 | Cryptococcus neoformans | This patent | atpD |
| 680 | Cunninghamella bertholletiae | This patent | atpD |
| 684 | Candida tropicalis | Database | atpD (V) |
| 685 | Enterococcus hirae | Database | atpD (V) |
| 686 | Chlamydia pneumoniae | Database | atpD (V) |
| 687 | Halobacterium salinarum | Database | atpD (V) |
| 688 | Homo sapiens | Database | atpD (V) |
| 689 | Plasmodium falciparum | Database | atpD (V) |
| 690 | Saccharomyces cerevisiae | Database | atpD (V) |
| 691 | Schizosaccharomyces pombe | Database | atpD (V) |
| 692 | Trypanosoma congolense | Database | atpD (V) |
| 693 | Thermus thermophilus | Database | atpD (V) |
| 698 | Escherichia coli | WO98/20157 | tuf |
| 709 | Borrelia burgdorferi | Database | atpD (V) |
| 710 | Treponema pallidum | Database | atpD (V) |
| 711 | Chlamydia trachomatis | Genome project | atpD (V) |
| 712 | Enterococcus faecalis | Genome project | atpD (V) |
| 713 | Methanosarcina barkeri | Database | atpD (V) |
| 714 | Methanococcus jannaschii | Database | atpD (V) |
| 715 | Porphyromonas gingivalis | Genome project | atpD (V) |
| 716 | Streptococcus pneumoniae | Genome project | atpD (V) |
| 717 | Burkholderia mallei | This patent | tuf |
| 718 | Burkholderia pseudomallei | This patent | tuf |
| 719 | Clostridium beijerinckii | This patent | tuf |
| 720 | Clostridium innocuum | This patent | tuf |
| 721 | Clostridium novyi | This patent | tuf |
| 722 | Clostridium septicum | This patent | tuf |
| 723 | Clostridium tertium | This patent | tuf |
| 724 | Clostridium tetani | This patent | tuf |
| 725 | Enterococcus malodoratus | This patent | tuf |
| 726 | Enterococcus sulfureus | This patent | tuf |
| 727 | Lactococcus garvieae | This patent | tuf |
| 728 | Mycoplasma pirum | This patent | tuf |
| 729 | Mycoplasma salivarium | This patent | tuf |
| 730 | Neisseria polysaccharea | This patent | tuf |
| 731 | Salmonella choleraesuis subsp. choleraesuis | This patent | tuf |
| | serotype Enteritidis | | |
| 732 | Salmonella choleraesuis subsp. choleraesuis | This patent | tuf |
| | serotype Gallinarum | | |
| 733 | Salmonella choleraesuis subsp. choleraesuis | This patent | tuf |
| | serotype Paratyphi B | | |
| 734 | Salmonella choleraesuis subsp. choleraesuis | This patent | tuf |
| | serotype Virchow | | |
| 735 | Serratia grimesii | This patent | tuf |
| 736 | Clostridium difficile | This patent | tuf |
| 737 | Burkholderia pseudomallei | This patent | atpD |
| 738 | Clostridium bifermentans | This patent | atpD |
| 739 | Clostridium beijerinckii | This patent | atpD |
| 740 | Clostridium difficile | This patent | atpD |
| 741 | Clostridium ramosum | This patent | atpD |
| 742 | Clostridium septicum | This patent | atpD |
| 743 | Clostridium tertium | This patent | atpD |
| 744 | Comamonas acidovorans | This patent | atpD |
| 745 | Klebsiella pneumoniae subsp. rhinoscleromatis | This patent | atpD |
| 746 | Neisseria canis | This patent | atpD |
| 747 | Neisseria cinerea | This patent | atpD |
| 748 | Neisseria cuniculi | This patent | atpD |
| 749 | Neisseria elongata subsp. elongata | This patent | atpD |
| 750 | Neisseria flavescens | This patent | atpD |
| 751 | Neisseria gonorrhoeae | This patent | atpD |
| 752 | Neisseria gonorrhoeae | This patent | atpD |
| 753 | Neisseria lactamica | This patent | atpD |
| 754 | Neisseria meningitidis | This patent | atpD |
| 755 | Neisseria mucosa | This patent | atpD |
| 756 | Neisseria subflava | This patent | atpD |
| 757 | Neisseria weaveri | This patent | atpD |
| 758 | Neisseria animalis | This patent | atpD |
| 759 | Proteus penneri | This patent | atpD |
| 760 | Salmonella choleraesuis subsp. choleraesuis | This patent | atpD |
| | serotype Enteritidis | | |
| 761 | Yersinia pestis | This patent | atpD |
| 762 | Burkholderia mallei | This patent | atpD |
| 763 | Clostridium sordellii | This patent | atpD |
| 764 | Clostridium novyi | This patent | atpD |
| 765 | Clostridium botulinum | This patent | atpD |
| 766 | Clostridium histolyticum | This patent | atpD |
| 767 | Peptostreptococcus prevotii | This patent | atpD |
| 768 | Absidia corymbifera | This patent | atpD |
| 769 | Alternaria alternata | This patent | atpD |
| 770 | Aspergillus flavus | This patent | atpD |
| 771 | Mucor circinelloides | This patent | atpD |
| 772 | Piedraia hortai | This patent | atpD |
| 773 | Pseudallescheria boydii | This patent | atpD |
| 774 | Rhizopus oryzae | This patent | atpD |
| 775 | Scopulariopsis koningii | This patent | atpD |
| 776 | Trichophyton mentagrophytes | This patent | atpD |
| 777 | Trichophyton tonsurans | This patent | atpD |
| 778 | Trichosporon cutaneum | This patent | atpD |
| 779 | Cladophialophora carrionii | This patent | tuf (EF-1) |
| 780 | Cunninghamella bertholletiae | This patent | tuf (EF-1) |
| 781 | Curvularia lunata | This patent | tuf (EF-1) |
| 782 | Fonsecaea pedrosoi | This patent | tuf (EF-1) |
| 783 | Microsporum audouinii | This patent | tuf (EF-1) |
| 784 | Mucor circinelloides | This patent | tuf (EF-1) |
| 785 | Phialophora verrucosa | This patent | tuf (EF-1) |
| 786 | Saksenaea vasiformis | This patent | tuf (EF-1) |
| 787 | Syncephalastrum racemosum | This patent | tuf (EF-1) |
| 788 | Trichophyton tonsurans | This patent | tuf (EF-1) |
| 789 | Trichophyton mentagrophytes | This patent | tuf (EF-1) |
| 790 | Bipolaris hawaiiensis | This patent | tuf (EF-1) |
| 791 | Aspergillus fumigatus | This patent | tuf (M) |
| 792 | Trichophyton mentagrophytes | This patent | tuf (M) |
| 827 | Clostridium novyi | This patent | atpD (V) |
| 828 | Clostridium difficile | This patent | atpD (V) |
| 829 | Clostridium septicum | This patent | atpD (V) |
| 830 | Clostridium botulinum | This patent | atpD (V) |
| 831 | Clostridium perfringens | This patent | atpD (V) |
| 832 | Clostridium tetani | This patent | atpD (V) |
| 833 | Streptococcus pyogenes | Database | atpD (V) |
| 834 | Babesia bovis | This patent | atpD (V) |
| 835 | Cryptosporidium parvum | This patent | atpD (V) |
| 836 | Leishmania infantum | This patent | atpD (V) |
| 837 | Leishmania major | This patent | atpD (V) |
| 838 | Leishmania tarentolae | This patent | atpD (V) |
| 839 | Trypanosoma brucei | This patent | atpD (V) |
| 840 | Trypanosoma cruzi | This patent | tuf (EF-1) |
| 841 | Trypanosoma cruzi | This patent | tuf (EF-1) |
| 842 | Trypanosoma cruzi | This patent | tuf (EF-1) |
| 843 | Babesia bovis | This patent | tuf (M) |
| 844 | Leishmania aethiopica | This patent | tuf (M) |
| 845 | Leishmania amazonensis | This patent | tuf (M) |
| 846 | Leishmania donovani | This patent | tuf (M) |
| 847 | Leishmania infantum | This patent | tuf (M) |
| 848 | Leishmania enriettii | This patent | tuf (M) |
| 849 | Leishmania gerbilli | This patent | tuf (M) |
| 850 | Leishmania major | This patent | tuf (M) |
| 851 | Leishmania mexicana | This patent | tuf (M) |
| 852 | Leishmania tarentolae | This patent | tuf (M) |
| 853 | Trypanosoma cruzi | This patent | tuf (M) |
| 854 | Trypanosoma cruzi | This patent | tuf (M) |
| 855 | Trypanosoma cruzi | This patent | tuf (M) |
| 856 | Babesia bigemina | This patent | atpD |
| 857 | Babesia bovis | This patent | atpD |
| 858 | Babesia microti | This patent | atpD |
| 859 | Leishmania guyanensis | This patent | atpD |
| 860 | Leishmania mexicana | This patent | atpD |
| 861 | Leishmania tropica | This patent | atpD |
| 862 | Leishmania tropica | This patent | atpD |
| 863 | Bordetella pertussis | Database | tuf |
| 864 | Trypanosoma brucei brucei | Database | tuf (EF-1) |
| 865 | Cryptosporidium parvum | This patent | tuf (EF-1) |
| 866 | Staphylococcus saprophyticus | This patent | atpD |
| 867 | Zoogloea ramigera | This patent | atpD |
| 868 | Staphylococcus saprophyticus | This patent | tuf |
| 869 | Enterococcus casseliflavus | This patent | tuf |
| 870 | Enterococcus casseliflavus | This patent | tuf |
| 871 | Enterococcus flavescens | This patent | tuf |
| 872 | Enterococcus gallinarum | This patent | tuf |
| 873 | Enterococcus gallinarum | This patent | tuf |
| 874 | Staphylococcus haemolyticus | This patent | tuf |
| 875 | Staphylococcus epidermidis | This patent | tuf |
| 876 | Staphylococcus epidermidis | This patent | tuf |
| 877 | Staphylococcus epidermidis | This patent | tuf |
| 878 | Staphylococcus epidermidis | This patent | tuf |
| 879 | Enterococcus gallinarum | This patent | tuf |
| 880 | Pseudomonas aeruginosa | This patent | tuf |
| 881 | Enterococcus casseliflavus | This patent | tuf |
| 882 | Enterococcus casseliflavus | This patent | tuf |
| 883 | Enterococcus faecalis | This patent | tuf |
| 884 | Enterococcus faecalis | This patent | tuf |
| 885 | Enterococcus faecium | This patent | tuf |
| 886 | Enterococcus faecium | This patent | tuf |
| 887 | Zoogloea ramigera | This patent | tuf |
| 888 | Enterococcus faecalis | This patent | tuf |
| 889 | Aspergillus fumigatus | This patent | atpD |
| 890 | Penicillium mameffei | This patent | atpD |
| 891 | Paecilomyces lilacinus | This patent | atpD |
| 892 | Penicillium mameffei | This patent | atpD |
| 893 | Sporothrix schenckii | This patent | atpD |
| 894 | Malbranchea filamentosa | This patent | atpD |
| 895 | Paecilomyces lilacinus | This patent | atpD |
| 896 | Aspergillus niger | This patent | atpD |
| 897 | Aspergillus fumigatus | This patent | tuf (EF-1) |
| 898 | Penicillium mameffei | This patent | tuf (EF-1) |
| 899 | Piedraia hortai | This patent | tuf (EF-1) |
| 900 | Paecilomyces lilacinus | This patent | tuf (EF-1) |
| 901 | Paracoccidioides brasiliensis | This patent | tuf (EF-1) |
| 902 | Sporothrix schenckii | This patent | tuf (EF-1) |
| 903 | Penicillium mameffei | This patent | tuf (EF-1) |
| 904 | Curvularia lunata | This patent | tuf (M) |
| 905 | Aspergillus niger | This patent | tuf (M) |
| 906 | Bipolaris hawaiiensis | This patent | tuf (M) |
| 907 | Aspergillus flavus | This patent | tuf (M) |
| 908 | Alternaria alternata | This patent | tuf (M) |
| 909 | Penicillium mameffei | This patent | tuf (M) |
| 910 | Penicillium mameffei | This patent | tuf (M) |
| 918 | Escherichia coli | Database | recA |
| 929 | Bacteroides fragilis | This patent | atpD (V) |
| 930 | Bacteroides distasonis | This patent | atpD (V) |
| 931 | Porphyromonas asaccharolytica | This patent | atpD (V) |
| 932 | Listeria monocytogenes | This patent | tuf |
| 939 | Saccharomyces cerevisiae | Database | recA (Rad51) |
| 940 | Saccharomyces cerevisiae | Database | recA (Dmc1) |
| 941 | Cryptococcus humicolus | This patent | atpD |
| 942 | Escherichia coli | This patent | atpD |
| 943 | Escherichia coli | This patent | atpD |
| 944 | Escherichia coli | This patent | atpD |
| 945 | Escherichia coli | This patent | atpD |
| 946 | Neisseria polysaccharea | This patent | atpD |
| 947 | Neisseria sicca | This patent | atpD |
| 948 | Streptococcus mitis | This patent | atpD |
| 949 | Streptococcus mitis | This patent | atpD |
| 950 | Streptococcus mitis | This patent | atpD |
| 951 | Streptococcus oralis | This patent | atpD |
| 952 | Streptococcus pneumoniae | This patent | atpD |
| 953 | Streptococcus pneumoniae | This patent | atpD |
| 954 | Streptococcus pneumoniae | This patent | atpD |
| 955 | Streptococcus pneumoniae | This patent | atpD |
| 956 | Babesia microti | This patent | atpD (V) |
| 957 | Entamoeba histolytica | This patent | atpD (V) |
| 958 | Fusobacterium nucleatum subsp. polymorphum | This patent | atpD (V) |
| 959 | Leishmania aethiopica | This patent | atpD (V) |
| 960 | Leishmania tropica | This patent | atpD (V) |
| 961 | Leishmania guyanensis | This patent | atpD (V) |
| 962 | Leishmania donovani | This patent | atpD (V) |
| 963 | Leishmania hertigi | This patent | atpD (V) |
| 964 | Leishmania mexicana | This patent | atpD (V) |
| 965 | Leishmania tropica | This patent | atpD (V) |
| 966 | Peptostreptococcus anaerobius | This patent | atpD (V) |
| 967 | Bordetella pertussis | This patent | tuf |
| 968 | Bordetella pertussis | This patent | tuf |
| 969 | Enterococcus columbae | This patent | tuf |
| 970 | Enterococcus flavescens | This patent | tuf |
| 971 | Streptococcus pneumoniae | This patent | tuf |
| 972 | Escherichia coli | This patent | tuf |
| 973 | Escherichia coli | This patent | tuf |
| 974 | Escherichia coli | This patent | tuf |
| 975 | Escherichia coli | This patent | tuf |
| 976 | Mycobacterium avium | This patent | tuf |
| 977 | Streptococcus pneumoniae | This patent | tuf |
| 978 | Mycobacterium gordonae | This patent | tuf |
| 979 | Streptococcus pneumoniae | This patent | tuf |
| 980 | Mycobacterium tuberculosis | This patent | tuf |
| 981 | Staphylococcus warneri | This patent | tuf |
| 982 | Streptococcus mitis | This patent | tuf |
| 983 | Streptococcus mitis | This patent | tuf |
| 984 | Streptococcus mitis | This patent | tuf |
| 985 | Streptococcus oralis | This patent | tuf |
| 986 | Streptococcus pneumoniae | This patent | tuf |
| 987 | Enterococcus hirae | This patent | tuf (C) |
| 988 | Enterococcus mundtii | This patent | tuf (C) |
| 989 | Enterococcus raffinosus | This patent | tuf (C) |
| 990 | Bacillus anthracis | This patent | recA |
| 991 | Prevotella melaninogenica | This patent | recA |
| 992 | Enterococcus casseliflavus | This patent | tuf |
| 993 | Streptococcus pyogenes | Database | speA |
| 1002 | Streptococcus pyogenes | WO98/20157 | tuf |
| 1003 | Bacillus cereus | This patent | recA |
| 1004 | Streptococcus pneumoniae | This patent | pbp1a |
| 1005 | Streptococcus pneumoniae | This patent | pbp1a |
| 1006 | Streptococcus pneumoniae | This patent | pbp1a |
| 1007 | Streptococcus pneumoniae | This patent | pbp1a |
| 1008 | Streptococcus pneumoniae | This patent | pbp1a |
| 1009 | Streptococcus pneumoniae | This patent | pbp1a |
| 1010 | Streptococcus pneumoniae | This patent | pbp1a |
| 1011 | Streptococcus pneumoniae | This patent | pbp1a |
| 1012 | Streptococcus pneumoniae | This patent | pbp1a |
| 1013 | Streptococcus pneumoniae | This patent | pbp1a |
| 1014 | Streptococcus pneumoniae | This patent | pbp1a |
| 1015 | Streptococcus pneumoniae | This patent | pbp1a |
| 1016 | Streptococcus pneumoniae | This patent | pbp1a |
| 1017 | Streptococcus pneumoniae | This patent | pbp1a |
| 1018 | Streptococcus pneumoniae | This patent | pbp1a |
| 1019 | Streptococcus pneumoniae | This patent | pbp2b |
| 1020 | Streptococcus pneumoniae | This patent | pbp2b |
| 1021 | Streptococcus pneumoniae | This patent | pbp2b |
| 1022 | Streptococcus pneumoniae | This patent | pbp2b |
| 1023 | Streptococcus pneumoniae | This patent | pbp2b |
| 1024 | Streptococcus pneumoniae | This patent | pbp2b |
| 1025 | Streptococcus pneumoniae | This patent | pbp2b |
| 1026 | Streptococcus pneumoniae | This patent | pbp2b |
| 1027 | Streptococcus pneumoniae | This patent | pbp2b |
| 1028 | Streptococcus pneumoniae | This patent | pbp2b |
| 1029 | Streptococcus pneumoniae | This patent | pbp2b |
| 1030 | Streptococcus pneumoniae | This patent | pbp2b |
| 1031 | Streptococcus pneumoniae | This patent | pbp2b |
| 1032 | Streptococcus pneumoniae | This patent | pbp2b |
| 1033 | Streptococcus pneumoniae | This patent | pbp2b |
| 1034 | Streptococcus pneumoniae | This patent | pbp2x |
| 1035 | Streptococcus pneumoniae | This patent | pbp2x |
| 1036 | Streptococcus pneumoniae | This patent | pbp2x |
| 1037 | Streptococcus pneumoniae | This patent | pbp2x |
| 1038 | Streptococcus pneumoniae | This patent | pbp2x |
| 1039 | Streptococcus pneumoniae | This patent | pbp2x |
| 1040 | Streptococcus pneumoniae | This patent | pbp2x |
| 1041 | Streptococcus pneumoniae | This patent | pbp2x |
| 1042 | Streptococcus pneumoniae | This patent | pbp2x |
| 1043 | Streptococcus pneumoniae | This patent | pbp2x |
| 1044 | Streptococcus pneumoniae | This patent | pbp2x |
| 1045 | Streptococcus pneumoniae | This patent | pbp2x |
| 1046 | Streptococcus pneumoniae | This patent | pbp2x |
| 1047 | Streptococcus pneumoniae | This patent | pbp2x |
| 1048 | Streptococcus pneumoniae | This patent | pbp2x |
| 1049 | Enterococcus faecium | This patent | vanA |
| 1050 | Enterococcus gallinarum | This patent | vanA |
| 1051 | Enterococcus faecium | This patent | vanA |
| 1052 | Enterococcus faecium | This patent | vanA |
| 1053 | Enterococcus faecium | This patent | vanA |
| 1054 | Enterococcus faecalis | This patent | vanA |
| 1055 | Enterococcus gallinarum | This patent | vanA |
| 1056 | Enterococcus faecium | This patent | vanA |
| 1057 | Enterococcus flavescens | This patent | vanA |
| 1058 | Enterococcus gallinarum | This patent | vanC1 |
| 1059 | Enterococcus gallinarum | This patent | vanC1 |
| 1060 | Enterococcus casseliflavus | This patent | vanC2 |
| 1061 | Enterococcus casseliflavus | This patent | vanC2 |
| 1062 | Enterococcus casseliflavus | This patent | vanC2 |
| 1063 | Enterococcus casseliflavus | This patent | vanC2 |
| 1064 | Enterococcus flavescens | This patent | vanC3 |
| 1065 | Enterococcus flavescens | This patent | vanC3 |
| 1066 | Enterococcus flavescens | This patent | vanC3 |
| 1067 | Enterococcus faecium | This patent | vanXY |
| 1068 | Enterococcus faecium | This patent | vanXY |
| 1069 | Enterococcus faecium | This patent | vanXY |
| 1070 | Enterococcus faecalis | This patent | vanXY |
| 1071 | Enterococcus gallinarum | This patent | vanXY |
| 1072 | Enterococcus faecium | This patent | vanXY |
| 1073 | Enterococcus flavescens | This patent | vanXY |
| 1074 | Enterococcus faecium | This patent | vanXY |
| 1075 | Enterococcus gallinarum | This patent | vanXY |
| 1076 | Escherichia coli | Database | stx₁ |
| 1077 | Escherichia coli | Database | stx₂ |
| 1093 | Staphylococcus saprophyticus | This patent | unknown |
| 1117 | Enterococcus faecium | Database | vanB |
| 1138 | Enterococcus gallinarum | Database | vanC1 |
| 1139 | Enterococcus faecium | Database | vanA |
| 1140 | Enterococcus casseliflavus | Database | vanC2 |
| 1141 | Enterococcus faecium | Database | vanHAXY |
| 1169 | Streptococcus pneumoniae | Database | pbp1a |
| 1172 | Streptococcus pneumoniae | Database | pbp2b |
| 1173 | Streptococcus pneumoniae | Database | pbp2x |
| 1178 | Staphylococcus aureus | Database | mecA |
| 1183 | Streptococcus pneumoniae | Database | hexA |
| 1184 | Streptococcus pneumoniae | This patent | hexA |
| 1185 | Streptococcus pneumoniae | This patent | hexA |
| 1186 | Streptococcus pneumoniae | This patent | hexA |
| 1187 | Streptococcus pneumoniae | This patent | hexA |
| 1188 | Streptococcus oralis | This patent | hexA |
| 1189 | Streptococcus mitis | This patent | hexA |
| 1190 | Streptococcus mitis | This patent | hexA |
| 1191 | Streptococcus mitis | This patent | hexA |
| 1198 | Staphylococcus saprophyticus | This patent | unknown |
| 1215 | Streptococcus pyogenes | Database | pcp |
| 1230 | Escherichia coli | Database | tuf (EF-G) |
| 1242 | Enterococcus faecium | Database | ddl |
| 1243 | Enterococcus faecalis | Database | mtlF, mtlD |
| 1244 | Staphylococcus aureus subsp. aureus | This patent | unknown |
| 1245 | Bacillus anthracis | This patent | atpD |
| 1246 | Bacillus mycoides | This patent | atpD |
| 1247 | Bacillus thuringiensis | This patent | atpD |
| 1248 | Bacillus thuringiensis | This patent | atpD |
| 1249 | Bacillus thuringiensis | This patent | atpD |
| 1250 | Bacillus weihenstephanensis | This patent | atpD |
| 1251 | Bacillus thuringiensis | This patent | atpD |
| 1252 | Bacillus thuringiensis | This patent | atpD |
| 1253 | Bacillus cereus | This patent | atpD |
| 1254 | Bacillus cereus | This patent | atpD |
| 1255 | Staphylococcus aureus | This patent | gyrA |
| 1256 | Bacillus weihenstephanensis | This patent | atpD |
| 1257 | Bacillus anthracis | This patent | atpD |
| 1258 | Bacillus thuringiensis | This patent | atpD |
| 1259 | Bacillus cereus | This patent | atpD |
| 1260 | Bacillus cereus | This patent | atpD |
| 1261 | Bacillus thuringiensis | This patent | atpD |
| 1262 | Bacillus thuringiensis | This patent | atpD |
| 1263 | Bacillus thuringiensis | This patent | atpD |
| 1264 | Bacillus thuringiensis | This patent | atpD |
| 1265 | Bacillus anthracis | This patent | atpD |
| 1266 | Paracoccidioides brasiliensis | This patent | tuf (EF-1) |
| 1267 | Blastomyces dermatitidis | This patent | tuf (EF-1) |
| 1268 | Histoplasma capsulatum | This patent | tuf (EF-1) |
| 1269 | Trichophyton rubrum | This patent | tuf (EF-1) |
| 1270 | Microsporum canis | This patent | tuf (EF-1) |
| 1271 | Aspergillus versicolor | This patent | tuf (EF-1) |
| 1272 | Exophiala moniliae | This patent | tuf (EF-1) |
| 1273 | Hortaea wemeckii | This patent | tuf (EF-1) |
| 1274 | Fusarium solani | This patent | tuf (EF-1) |
| 1275 | Aureobasidium pullulans | This patent | tuf (EF-1) |
| 1276 | Blastomyces dermatitidis | This patent | tuf (EF-1) |
| 1277 | Exophiala dermatitidis | This patent | tuf (EF-1) |
| 1278 | Fusarium moniliforme | This patent | tuf (EF-1) |
| 1279 | Aspergillus terreus | This patent | tuf (EF-1) |
| 1280 | Aspergillus fumigatus | This patent | tuf (EF-1) |
| 1281 | Cryptococcus laurentii | This patent | tuf (EF-1) |
| 1282 | Emmonsia parva | This patent | tuf (EF-1) |
| 1283 | Fusarium solani | This patent | tuf (EF-1) |
| 1284 | Sporothrix schenckii | This patent | tuf (EF-1) |
| 1285 | Aspergillus nidulans | This patent | tuf (EF-1) |
| 1286 | Cladophialophora carrionii | This patent | tuf (EF-1) |
| 1287 | Exserohilum rostratum | This patent | tuf (EF-1) |
| 1288 | Bacillus thuringiensis | This patent | recA |
| 1289 | Bacillus thuringiensis | This patent | recA |
| 1299 | Staphylococcus aureus | Database | gyrA |
| 1300 | Escherichia coli | Database | gyrA |
| 1307 | Staphylococcus aureus | Database | gyrB |
| 1320 | Escherichia coli | Database | parC (grlA) |
| 1321 | Staphylococcus aureus | Database | parC (grlA) |
| 1328 | Staphylococcus aureus | Database | parE (grlB) |
| 1348 | unidentified bacterium | Database | aac2Ia |
| 1351 | Pseudomonas aeruginosa | Database | aac3Ib |
| 1356 | Serratia marcescens | Database | aac3IIb |
| 1361 | Escherichia coli | Database | aac3IVa |
| 1366 | Enterobacter cloacae | Database | aac3VIa |
| 1371 | Citrobacter koseri | Database | aac6Ia |
| 1376 | Serratia marcescens | Database | aac6Ic |
| 1381 | Escherichia coli | Database | ant3Ia |
| 1386 | Staphylococcus aureus | Database | ant4Ia |
| 1391 | Escherichia coli | Database | aph3Ia |
| 1396 | Escherichia coli | Database | aph3IIa |
| 1401 | Enterococcus faecalis | Database | aph3IIIa |
| 1406 | Acinetobacter baumannii | Database | aph3VIa |
| 1411 | Pseudomonas aeruginosa | Database | blaCARB |
| 1416 | Klebsiella pneumoniae | Database | blaCMY-2 |
| 1423 | Escherichia coli | Database | blaCTX-M-1 |
| 1428 | Salmonella choleraesuis subsp. choleraesuis serotype | Database | blaCTX-M-2 |
| | Typhimurium | | |
| 1433 | Pseudomonas aeruginosa | Database | blaIMP |
| 1438 | Escherichia coli | Database | blaOXA2 |
| 1439 | Pseudomonas aeruginosa | Database | blaOXA10 |
| 1442 | Pseudomonas aeruginosa | Database | blaPER1 |
| 1445 | Salmonella choleraesuis subsp. choleraesuis serotype | Database | blaPER2 |
| | Typhimurium | | |
| 1452 | Staphylococcus epidermidis | Database | dfrA |
| 1461 | Escherichia coli | Database | dhfrIa |
| 1470 | Escherichia coli | Database | dhfrIb |
| 1475 | Escherichia coli | Database | dhfrV |
| 1480 | Proteus mirabilis | Database | dhfrVI |
| 1489 | Escherichia coli | Database | dhfrVII |
| 1494 | Escherichia coli | Database | dhfrVIII |
| 1499 | Escherichia coli | Database | dhfrIX |
| 1504 | Escherichia coli | Database | dhfrXII |
| 1507 | Escherichia coli | Database | dhfrXIII |
| 1512 | Escherichia coli | Database | dhfrXV |
| 1517 | Escherichia coli | Database | dhfrXVII |
| 1518 | Acinetobacter lwoffii | This patent | fusA |
| 1519 | Acinetobacter lwoffii | This patent | fusA-tuf spacer |
| 1520 | Acinetobacter lwoffii | This patent | tuf |
| 1521 | Haemophilus influenzae | This patent | fusA |
| 1522 | Haemophilus influenzae | This patent | fusA-tuf spacer |
| 1523 | Haemophilus influenzae | This patent | tuf |
| 1524 | Proteus mirabilis | This patent | fusA |
| 1525 | Proteus mirabilis | This patent | fusA-tuf spacer |
| 1526 | Proteus mirabilis | This patent | fuf |
| 1527 | Campylobacter curvus | This patent | atpD |
| 1530 | Escherichia coli | Database | ereA |
| 1535 | Escherichia coli | Database | ereB |
| 1540 | Staphylococcus haemolyticus | Database | linA |
| 1545 | Enterococcus faecium | Database | linB |
| 1548 | Streptococcus pyogenes | Database | mefA |
| 1551 | Streptococcus pneumoniae | Database | mefE |
| 1560 | Escherichia coli | Database | mphA |
| 1561 | Candida albicans | This patent | tuf (EF-1) |
| 1562 | Candida dubliniensis | This patent | tuf (EF-1) |
| 1563 | Candida famata | This patent | tuf (EF-1) |
| 1564 | Candida glabrata | This patent | tuf (EF-1) |
| 1565 | Candida guilliermondii | This patent | tuf (EF-1) |
| 1566 | Candida haemulonii | This patent | tuf (EF-1) |
| 1567 | Candida kefyr | This patent | tuf (EF-1) |
| 1568 | Candida lusitaniae | This patent | tuf (EF-1) |
| 1569 | Candida sphaerica | This patent | tuf (EF-1) |
| 1570 | Candida tropicalis | This patent | tuf (EF-1) |
| 1571 | Candida viswanathii | This patent | tuf (EF-1) |
| 1572 | Alcaligenes faecalis subsp. faecalis | This patent | tuf |
| 1573 | Prevotella buccalis | This patent | tuf |
| 1574 | Succinivibrio dextrinosolvens | This patent | tuf |
| 1575 | Tetragenococcus halophilus | This patent | tuf |
| 1576 | Campylobacter jejuni subsp. jejuni | This patent | atpD |
| 1577 | Campylobacter rectus | This patent | atpD |
| 1578 | Enterococcus casseliflavus | This patent | fusA |
| 1579 | Enterococcus gallinarum | This patent | fusA |
| 1580 | Streptococcus mitis | This patent | fusA |
| 1585 | Enterococcus faecium | Database | satG |
| 1590 | Cloning vector pFW16 | Database | tetM |
| 1594 | Enterococcus faecium | Database | vanD |
| 1599 | Enterococcus faecalis | Database | vanE |
| 1600 | Campylobacter jejuni subsp. doylei | This patent | atpD |
| 1601 | Enterococcus sulfurous | This patent | atpD |
| 1602 | Enterococcus solitarius | This patent | atpD |
| 1603 | Campylobacter sputorum subsp. sputorum | This patent | atpD |
| 1604 | Enterococcus pseudoavium | This patent | atpD |
| 1607 | Klebsiella omithinolytica | This patent | gyrA |
| 1608 | Klebsiella oxytoca | This patent | gyrA |
| 1613 | Staphylococcus aureus | Database | vatB |
| 1618 | Staphylococcus cohnii | Database | vatC |
| 1623 | Staphylococcus aureus | Database | vga |
| 1628 | Staphylococcus aureus | Database | vgaB |
| 1633 | Staphylococcus aureus | Database | vgb |
| 1638 | Aspergillus fumigatus | This patent | atpD |
| 1639 | Aspergillus fumigatus | This patent | atpD |
| 1640 | Bacillus mycoides | This patent | atpD |
| 1641 | Bacillus mycoides | This patent | atpD |
| 1642 | Bacillus mycoides | This patent | atpD |
| 1643 | Bacillus pseudomycoides | This patent | atpD |
| 1644 | Bacillus pseudomycoides | This patent | atpD |
| 1645 | Budvicia aquatica | This patent | atpD |
| 1646 | Buttiauxella agrestis | This patent | atpD |
| 1647 | Candida norvegica | This patent | atpD |
| 1648 | Streptococcus pneumoniae | This patent | pbp1a |
| 1649 | Campylobacter lari | This patent | atpD |
| 1650 | Coccidioides immitis | This patent | atpD |
| 1651 | Emmonsia parva | This patent | atpD |
| 1652 | Erwinia amylovora | This patent | atpD |
| 1653 | Fonsecaea pedrosoi | This patent | atpD |
| 1654 | Fusarium moniliforme | This patent | atpD |
| 1655 | Klebsiella oxytoca | This patent | atpD |
| 1656 | Microsporum audouinii | This patent | atpD |
| 1657 | Obesumbacterium proteus | This patent | atpD |
| 1658 | Paracoccidioides brasiliensis | This patent | atpD |
| 1659 | Plesiomonas shigelloides | This patent | atpD |
| 1660 | Shewanella putrefaciens | This patent | atpD |
| 1662 | Campylobacter curvus | This patent | tuf |
| 1663 | Campylobacter rectus | This patent | tuf |
| 1664 | Fonsecaea pedrosoi | This patent | tuf |
| 1666 | Microsporum audouinii | This patent | tuf |
| 1667 | Piedraia hortai | This patent | tuf |
| 1668 | Escherichia coli | Database | tuf |
| 1669 | Saksenaea vasiformis | This patent | tuf |
| 1670 | Trichophyton tonsurans | This patent | tuf |
| 1671 | Enterobacter aerogenes | This patent | atpD |
| 1672 | Bordetella pertussis | Database | atpD |
| 1673 | Arcanobacterium haemolyticum | This patent | tuf |
| 1674 | Butyrivibrio fibrisolvens | This patent | tuf |
| 1675 | Campylobacter jejuni subsp. doylei | This patent | tuf |
| 1676 | Campylobacter lari | This patent | tuf |
| 1677 | Campylobacter sputorum subsp. sputorum | This patent | tuf |
| 1678 | Campylobacter upsaliensis | This patent | tuf |
| 1679 | Globicatella sanguis | This patent | tuf |
| 1680 | Lactobacillus acidophilus | This patent | tuf |
| 1681 | Leuconostoc mesenteroides subsp. dextranicum | This patent | tuf |
| 1682 | Prevotella buccalis | This patent | tuf |
| 1683 | Ruminococcus bromii | This patent | tuf |
| 1684 | Paracoccidioides brasiliensis | This patent | atpD |
| 1685 | Candida norvegica | This patent | tuf (EF-1) |
| 1686 | Aspergillus nidulans | This patent | tuf |
| 1687 | Aspergillus terreus | This patent | tuf |
| 1688 | Candida norvegica | This patent | tuf |
| 1689 | Candida parapsilosis | This patent | tuf |
| 1702 | Streptococcus gordonii | WO98/20157 | recA |
| 1703 | Streptococcus mutans | WO98/20157 | recA |
| 1704 | Streptococcus pneumoniae | WO98/20157 | recA |
| 1705 | Streptococcus pyogenes | WO98/20157 | recA |
| 1706 | Streptococcus salivarius subsp. thermophilus | WO98/20157 | recA |
| 1707 | Escherichia coli | WO98/20157 | oxa |
| 1708 | Enterococcus faecalis | WO98/20157 | blaZ |
| 1709 | Pseudomonas aeruginosa | WO98/20157 | aac6′-IIa |
| 1710 | Staphylococcus aureus | WO98/20157 | ermA |
| 1711 | Escherichia coli | WO98/20157 | ermB |
| 1712 | Staphylococcus aureus | WO98/20157 | ermC |
| 1713 | Enterococcus faecalis | WO98/20157 | vanB |
| 1714 | Campylobacter jejuni subsp. jejuni | This patent | recA |
| 1715 | Abiotrophia adiacens | WO98/20157 | tuf |
| 1716 | Abiotrophia defectiva | WO98/20157 | tuf |
| 1717 | Corynebacterium accolens | WO98/20157 | tuf |
| 1718 | Corynebacterium genitalium | WO98/20157 | tuf |
| 1719 | Corynebacterium jeikeium | WO98/20157 | tuf |
| 1720 | Corynebacterium pseudodiphtheriticum | WO98/20157 | tuf |
| 1721 | Corynebacterium striatum | WO98/20157 | tuf |
| 1722 | Enterococcus avium | WO98/20157 | tuf |
| 1723 | Gardnerella vaginalis | WO98/20157 | tuf |
| 1724 | Listeria innocua | WO98/20157 | tuf |
| 1725 | Listeria ivanovii | WO98/20157 | tuf |
| 1726 | Listeria monocytogenes | WO98/20157 | tuf |
| 1727 | Listeria seeligeri | WO98/20157 | tuf |
| 1728 | Staphylococcus aureus | WO98/20157 | tuf |
| 1729 | Staphylococcus saprophyticus | WO98/20157 | tuf |
| 1730 | Staphylococcus simulans | WO98/20157 | tuf |
| 1731 | Streptococcus agalactiae | WO98/20157 | tuf |
| 1732 | Streptococcus pneumoniae | WO98/20157 | tuf |
| 1733 | Streptococcus salivarius | WO98/20157 | tuf |
| 1734 | Agrobacterium radiobacter | WO98/20157 | tuf |
| 1735 | Bacillus subtilis | WO98/20157 | tuf |
| 1736 | Bacteroides fragilis | WO98/20157 | tuf |
| 1737 | Borrelia burgdorferi | WO98/20157 | tuf |
| 1738 | Brevibacterium linens | WO98/20157 | tuf |
| 1739 | Chlamydia trachomatis | WO98/20157 | tuf |
| 1740 | Fibrobacter succinogenes | WO98/20157 | tuf |
| 1741 | Flavobacterium ferrugineum | WO98/20157 | tuf |
| 1742 | Helicobacter pylori | WO98/20157 | tuf |
| 1743 | Micrococcus luteus | WO98/20157 | tuf |
| 1744 | Mycobacterium tuberculosis | WO98/20157 | tuf |
| 1745 | Mycoplasma genitalium | WO98/20157 | tuf |
| 1746 | Neisseria gonorrhoeae | WO98/20157 | tuf |
| 1747 | Rickettsia prowazekii | WO98/20157 | tuf |
| 1748 | Salmonella choleraesuis subsp. choleraesuis | WO98/20157 | tuf |
| | serotype Typhimurium | | |
| 1749 | Shewanella putrefaciens | WO98/20157 | tuf |
| 1750 | Stigmatella aurantiaca | WO98/20157 | tuf |
| 1751 | Thiomonas cuprina | WO98/20157 | tuf |
| 1752 | Treponema pallidum | WO98/20157 | tuf |
| 1753 | Ureaplasma urealyticum | WO98/20157 | tuf |
| 1754 | Wolinella succinogenes | WO98/20157 | tuf |
| 1755 | Burkholderia cepacia | WO98/20157 | tuf |
| 1756 | Bacillus anthracis | This patent | recA |
| 1757 | Bacillus anthracis | This patent | recA |
| 1758 | Bacillus cereus | This patent | recA |
| 1759 | Bacillus cereus | This patent | recA |
| 1760 | Bacillus mycoides | This patent | recA |
| 1761 | Bacillus pseudomycoides | This patent | recA |
| 1762 | Bacillus thuringiensis | This patent | recA |
| 1763 | Bacillus thuringiensis | This patent | recA |
| 1764 | Klebsiella oxytoca | This patent | gyrA |
| 1765 | Klebsiella pneumoniae subsp. ozaenae | This patent | gyrA |
| 1766 | Klebsiella planticola | This patent | gyrA |
| 1767 | Klebsiella pneumoniae | This patent | gyrA |
| 1768 | Klebsiella pneumoniae subsp. pneumoniae | This patent | gyrA |
| 1769 | Klebsiella pneumoniae subsp. pneumoniae | This patent | gyrA |
| 1770 | Klebsiella pneumoniae subsp. rhinoscleromatis | This patent | gyrA |
| 1771 | Klebsiella terrigena | This patent | gyrA |
| 1772 | Legionella pneumophila subsp. pneumophila | This patent | gyrA |
| 1773 | Proteus mirabilis | This patent | gyrA |
| 1774 | Providencia rettgeri | This patent | gyrA |
| 1775 | Proteus vulgaris | This patent | gyrA |
| 1776 | Yersinia enterocolitica | This patent | gyrA |
| 1777 | Klebsiella oxytoca | This patent | parC (grlA) |
| 1778 | Klebsiella oxytoca | This patent | parC (grlA) |
| 1779 | Klebsiella pneumoniae subsp. ozaenae | This patent | parC (grlA) |
| 1780 | Klebsiella planticola | This patent | parC (grlA) |
| 1781 | Klebsiella pneumoniae | This patent | parC (grlA) |
| 1782 | Klebsiella pneumoniae subsp. pneumoniae | This patent | parC (grlA) |
| 1783 | Klebsiella pneumoniae subsp. pneumoniae | This patent | parC (grlA) |
| 1784 | Klebsiella pneumoniae subsp. rhinoscleromatis | This patent | parC (grlA) |
| 1785 | Klebsiella terrigena | This patent | parC (grlA) |
| 1786 | Bacillus cereus | This patent | fusA |
| 1787 | Bacillus cereus | This patent | fusA |
| 1788 | Bacillus anthracis | This patent | fusA |
| 1789 | Bacillus cereus | This patent | fusA |
| 1790 | Bacillus anthracis | This patent | fusA |
| 1791 | Bacillus pseudomycoides | This patent | fusA |
| 1792 | Bacillus cereus | This patent | fusA |
| 1793 | Bacillus anthracis | This patent | fusA |
| 1794 | Bacillus cereus | This patent | fusA |
| 1795 | Bacillus weihenstephanensis | This patent | fusA |
| 1796 | Bacillus mycoides | This patent | fusA |
| 1797 | Bacillus thuringiensis | This patent | fusA |
| 1798 | Bacillus weihenstephanensis | This patent | fusA-tuf spacer |
| 1799 | Bacillus thuringiensis | This patent | fusA-tuf spacer |
| 1800 | Bacillus anthracis | This patent | fusA-tuf spacer |
| 1801 | Bacillus pseudomycoides | This patent | fusA-tuf spacer |
| 1802 | Bacillus anthracis | This patent | fusA-tuf spacer |
| 1803 | Bacillus cereus | This patent | fusA-tuf spacer |
| 1804 | Bacillus cereus | This patent | fusA-tuf spacer |
| 1805 | Bacillus mycoides | This patent | fusA-tuf spacer |
| 1806 | Bacillus cereus | This patent | fusA-tuf spacer |
| 1807 | Bacillus cereus | This patent | fusA-tuf spacer |
| 1808 | Bacillus cereus | This patent | fusA-tuf spacer |
| 1809 | Bacillus anthracis | This patent | fusA-tuf spacer |
| 1810 | Bacillus mycoides | This patent | tuf |
| 1811 | Bacillus thuringiensis | This patent | tuf |
| 1812 | Bacillus cereus | This patent | tuf |
| 1813 | Bacillus weihenstephanensis | This patent | tuf |
| 1814 | Bacillus anthracis | This patent | tuf |
| 1815 | Bacillus cereus | This patent | tuf |
| 1816 | Bacillus cereus | This patent | tuf |
| 1817 | Bacillus anthracis | This patent | tuf |
| 1818 | Bacillus cereus | This patent | tuf |
| 1819 | Bacillus anthracis | This patent | tuf |
| 1820 | Bacillus pseudomycoides | This patent | tuf |
| 1821 | Bacillus cereus | This patent | tuf |
| 1822 | Streptococcus oralis | This patent | fusA |
| 1823 | Budvicia aquatica | This patent | fusA |
| 1824 | Buttiauxella agrestis | This patent | fusA |
| 1825 | Klebsiella oxytoca | This patent | fusA |
| 1826 | Plesiomonas shigelloides | This patent | fusA |
| 1827 | Shewanella putrefaciens | This patent | fusA |
| 1828 | Obesumbacterium proteus | This patent | fusA |
| 1829 | Klebsiella oxytoca | This patent | fusA-tuf spacer |
| 1830 | Budvicia aquatica | This patent | fusA-tuf spacer |
| 1831 | Plesiomonas shigelloides | This patent | fusA-tuf spacer |
| 1832 | Obesumbacterium proteus | This patent | fusA-tuf spacer |
| 1833 | Shewanella putrefaciens | This patent | fusA-tuf spacer |
| 1834 | Buttiauxella agrestis | This patent | fusA-tuf spacer |
| 1835 | Campylobacter coli | This patent | tuf |
| 1836 | Campylobacter fetus subsp. fetus | This patent | tuf |
| 1837 | Campylobacter fetus subsp. venerealis | This patent | tuf |
| 1838 | Buttiauxella agrestis | This patent | tuf |
| 1839 | Klebsiella oxytoca | This patent | tuf |
| 1840 | Plesiomonas shigelloides | This patent | tuf |
| 1841 | Shewanella putrefaciens | This patent | tuf |
| 1842 | Obesumbacterium proteus | This patent | tuf |
| 1843 | Budvicia aquatica | This patent | tuf |
| 1844 | Abiotrophia adiacens | This patent | atpD |
| 1845 | Arcanobacterium haemolyticum | This patent | atpD |
| 1846 | Basidiobolus ranarum | This patent | atpD |
| 1847 | Blastomyces dermatitidis | This patent | atpD |
| 1848 | Blastomyces dermatitidis | This patent | atpD |
| 1849 | Campylobacter coli | This patent | atpD |
| 1850 | Campylobacter fetus subsp. fetus | This patent | atpD |
| 1851 | Campylobacter fetus subsp. venerealis | This patent | atpD |
| 1852 | Campylobacter gracilis | This patent | atpD |
| 1853 | Campylobacter jejuni subsp. jejuni | This patent | atpD |
| 1854 | Enterococcus cecorum | This patent | atpD |
| 1855 | Enterococcus columbae | This patent | atpD |
| 1856 | Enterococcus dispar | This patent | atpD |
| 1857 | Enterococcus malodoratus | This patent | atpD |
| 1858 | Enterococcus mundtii | This patent | atpD |
| 1859 | Enterococcus raffinosus | This patent | atpD |
| 1860 | Globicatella sanguis | This patent | atpD |
| 1861 | Lactococcus garvieae | This patent | atpD |
| 1862 | Lactococcus lactis | This patent | atpD |
| 1863 | Listeria ivanovii | This patent | atpD |
| 1864 | Succinivibrio dextrinosolvens | This patent | atpD |
| 1865 | Tetragenococcus halophilus | This patent | atpD |
| 1866 | Campylobacter fetus subsp. fetus | This patent | recA |
| 1867 | Campylobacter fetus subsp. venerealis | This patent | recA |
| 1868 | Campylobacter jejuni subsp. jejuni | This patent | recA |
| 1869 | Enterococcus avium | This patent | recA |
| 1870 | Enterococcus faecium | This patent | recA |
| 1871 | Listeria monocytogenes | This patent | recA |
| 1872 | Streptococcus mitis | This patent | recA |
| 1873 | Streptococcus oralis | This patent | recA |
| 1874 | Aspergillus fumigatus | This patent | tuf (M) |
| 1875 | Aspergillus versicolor | This patent | tuf (M) |
| 1876 | Basidiobolus ranarum | This patent | tuf (M) |
| 1877 | Campylobacter gracilis | This patent | tuf |
| 1878 | Campylobacter jejuni subsp. jejuni | This patent | tuf |
| 1879 | Coccidioides immitis | This patent | tuf (M) |
| 1880 | Erwinia amylovora | This patent | tuf |
| 1881 | Salmonella choleraesuis subsp. choleraesuis serotype | This patent | tuf |
| | Typhimurium | | |
| 1899 | Klebsiella pneumoniae | Database | blaSHV |
| 1900 | Klebsiella pneumoniae | Database | blaSHV |
| 1901 | Escherichia coli | Database | blaSHV |
| 1902 | Klebsiella pneumoniae | Database | blaSHV |
| 1903 | Klebsiella pneumoniae | Database | blaSHV |
| 1904 | Escherichia coli | Database | blaSHV |
| 1905 | Pseudomonas aeruginosa | Database | blaSHV |
| 1927 | Neisseria meningitidis | Database | blaTEM |
| 1928 | Escherichia coli | Database | blaTEM |
| 1929 | Klebsiella oxytoca | Database | blaTEM |
| 1930 | Escherichia coli | Database | blaTEM |
| 1931 | Escherichia coli | Database | blaTEM |
| 1932 | Escherichia coli | Database | blaTEM |
| 1933 | Escherichia coli | Database | blaTEM |
| 1954 | Klebsiella pneumoniae subsp. pneumoniae | Database | gyrA |
| 1956 | Candida inconspicua | This patent | tuf (M) |
| 1957 | Candida utilis | This patent | tuf (M) |
| 1958 | Candida zeylanoides | This patent | tuf (M) |
| 1959 | Candida catenulata | This patent | tuf (M) |
| 1960 | Candida krusei | This patent | tuf (M) |
| 1965 | Plasmid pGS05 | Database | sulII |
| 1970 | Transposon Tn10 | Database | tetB |
| 1985 | Cryptococcus neoformans | Database | tuf (EF-1) |
| 1986 | Cryptococcus neoformans | Database | tuf (EF-1) |
| 1987 | Saccharomyces cerevisiae | Database | tuf (EF-1) |
| 1988 | Saccharomyces cerevisiae | Database | tuf (EF-1) |
| 1989 | Eremothecium gossypii | Database | tuf (EF-1) |
| 1990 | Eremothecium gossypii | Database | tuf (EF-1) |
| 1991 | Aspergillus oryzae | Database | tuf (EF-1) |
| 1992 | Aureobasidium pullulans | Database | tuf (EF-1) |
| 1993 | Histoplasma capsulatum | Database | tuf (EF-1) |
| 1994 | Neurospora crassa | Database | tuf (EF-1) |
| 1995 | Podospora anserina | Database | tuf (EF-1) |
| 1996 | Podospora curvicolla | Database | tuf (EF-1) |
| 1997 | Sordaria macrospora | Database | tuf (EF-1) |
| 1998 | Trichoderma reesei | Database | tuf (EF-1) |
| 2004 | Candida albicans | Database | tuf (M) |
| 2005 | Schizosaccharomyces pombe | Database | tuf (M) |
| 2010 | Klebsiella pneumoniae | Database | blaTEM |
| 2011 | Klebsiella pneumoniae | Database | blaTEM |
| 2013 | Kluyvera ascorbata | This patent | gyrA |
| 2014 | Kluyvera georgiana | This patent | gyrA |
| 2047 | Streptococcus pneumoniae | Database | pbp1A |
| 2048 | Streptococcus pneumoniae | Database | pbp1A |
| 2049 | Streptococcus pneumoniae | Database | pbp1A |
| 2050 | Streptococcus pneumoniae | Database | pbp1A |
| 2051 | Streptococcus pneumoniae | Database | pbp1A |
| 2052 | Streptococcus pneumoniae | Database | pbp1A |
| 2053 | Streptococcus pneumoniae | Database | pbp1A |
| 2054 | Streptococcus pneumoniae | Database | gyrA |
| 2055 | Streptococcus pneumoniae | Database | parC |
| 2056 | Streptococcus pneumoniae | This patent | pbp1A |
| 2057 | Streptococcus pneumoniae | This patent | pbp1A |
| 2058 | Streptococcus pneumoniae | This patent | pbp1A |
| 2059 | Streptococcus pneumoniae | This patent | pbp1A |
| 2060 | Streptococcus pneumoniae | This patent | pbp1A |
| 2061 | Streptococcus pneumoniae | This patent | pbp1A |
| 2062 | Streptococcus pneumoniae | This patent | pbp1A |
| 2063 | Streptococcus pneumoniae | This patent | pbp1A |
| 2064 | Streptococcus pneumoniae | This patent | pbp1A |
| 2072 | Mycobacterium tuberculosis | Database | rpoB |
| 2097 | Mycoplasma pneumoniae | Database | tuf |
| 2101 | Mycobacterium tuberculosis | Database | inhA |
| 2105 | Mycobacterium tuberculosis | Database | embB |
| 2129 | Clostridium difficile | Database | cdtA |
| 2130 | Clostridium difficile | Database | cdtB |
| 2137 | Pseudomonas putida | Genome project | tuf |
| 2138 | Pseudomonas aeruginosa | Genome project | tuf |
| 2139 | Campylobacter jejuni | Database | atpD |
| 2140 | Streptococcus pneumoniae | Database | pbp1a |
| 2144 | Staphylococcus aureus | Database | mupA |
| 2147 | Escherichia coli | Database | catI |
| 2150 | Escherichia coli | Database | catII |
| 2153 | Shigella flexneri | Database | catIII |
| 2156 | Clostridium perfringens | Database | catP |
| 2159 | Staphylococcus aureus | Database | cat |
| 2162 | Staphylococcus aureus | Database | cat |
| 2165 | Salmonella typhimurium | Database | ppflo-like |
| 2183 | Alcaligenes faecalis subsp. faecalis | This patent | tuf |
| 2184 | Campylobacter coli | This patent | fusA |
| 2185 | Succinivibrio dextrinosolvens | This patent | tuf |
| 2186 | Tetragenococcus halophilus | This patent | tuf |
| 2187 | Campylobacter jejuni subsp. jejuni | This patent | fusA |
| 2188 | Campylobacter jejuni subsp. jejuni | This patent | fusA |
| 2189 | Leishmania guyanensis | This patent | atpD |
| 2190 | Trypanosoma brucei brucei | This patent | atpD |
| 2191 | Aspergillus nidulans | This patent | atpD |
| 2192 | Leishmania panamensis | This patent | atpD |
| 2193 | Aspergillus nidulans | This patent | tuf (M) |
| 2194 | Aureobasidium pullulans | This patent | tuf (M) |
| 2195 | Emmonsia parva | This patent | tuf (M) |
| 2196 | Exserohilum rostratum | This patent | tuf (M) |
| 2197 | Fusarium moniliforme | This patent | tuf (M) |
| 2198 | Fusarium solani | This patent | tuf (M) |
| 2199 | Histoplasma capsulatum | This patent | tuf (M) |
| 2200 | Kocuria kristinae | This patent | tuf |
| 2201 | Vibrio mimicus | This patent | tuf |
| 2202 | Citrobacter freundii | This patent | recA |
| 2203 | Clostridium botulinum | This patent | recA |
| 2204 | Francisella tularensis | This patent | recA |
| 2205 | Peptostreptococcus anaerobius | This patent | recA |
| 2206 | Peptostreptococcus asaccharolyticus | This patent | recA |
| 2207 | Providencia stuartii | This patent | recA |
| 2208 | Salmonella choleraesuis subsp. choleraesuis | This patent | recA |
| | serotype Paratyphi A | | |
| 2209 | Salmonella choleraesuis subsp. choleraesuis | This patent | recA |
| | serotype Typhimurium | | |
| 2210 | Staphylococcus saprophyticus | This patent | recA |
| 2211 | Yersinia pseudotuberculosis | This patent | recA |
| 2212 | Zoogloea ramigera | This patent | recA |
| 2214 | Abiotrophia adiacens | This patent | fusA |
| 2215 | Acinetobacter baumannii | This patent | fusA |
| 2216 | Actinomyces meyeri | This patent | fusA |
| 2217 | Clostridium difficile | This patent | fusA |
| 2218 | Corynebacterium diphtheriae | This patent | fusA |
| 2219 | Enterobacter cloacae | This patent | fusA |
| 2220 | Klebsiella pneumoniae subsp. pneumoniae | This patent | fusA |
| 2221 | Listeria monocytogenes | This patent | fusA |
| 2222 | Mycobacterium avium | This patent | fusA |
| 2223 | Mycobacterium gordonae | This patent | fusA |
| 2224 | Mycobacterium kansasii | This patent | fusA |
| 2225 | Mycobacterium terrae | This patent | fusA |
| 2226 | Neisseria polysaccharea | This patent | fusA |
| 2227 | Staphylococcus epidermidis | This patent | fusA |
| 2228 | Staphylococcus haemolyticus | This patent | fusA |
| 2229 | Succinivibrio dextrinosolvens | This patent | fusA |
| 2230 | Tetragenococcus halophilus | This patent | fusA |
| 2231 | Veillonella parvula | This patent | fusA |
| 2232 | Yersinia pseudotuberculosis | This patent | fusA |
| 2233 | Zoogloea ramigera | This patent | fusA |
| 2234 | Aeromonas hydrophila | This patent | fusA |
| 2235 | Abiotrophia adiacens | This patent | fusA-tuf spacer |
| 2236 | Acinetobacter baumannii | This patent | fusA-tuf spacer |
| 2237 | Actinomyces meyeri | This patent | fusA-tuf spacer |
| 2238 | Clostridium difficile | This patent | fusA-tuf spacer |
| 2239 | Corynebacterium diphtheriae | This patent | fusA-tuf spacer |
| 2240 | Enterobacter cloacae | This patent | fusA-tuf spacer |
| 2241 | Klebsiella pneumoniae subsp. pneumoniae | This patent | fusA-tuf spacer |
| 2242 | Listeria monocytogenes | This patent | fusA-tuf spacer |
| 2243 | Mycobacterium avium | This patent | fusA-tuf spacer |
| 2244 | Mycobacterium gordonae | This patent | fusA-tuf spacer |
| 2245 | Mycobacterium kansasii | This patent | fusA-tuf spacer |
| 2246 | Mycobacterium terrae | This patent | fusA-tuf spacer |
| 2247 | Neisseria polysaccharea | This patent | fusA-tuf spacer |
| 2248 | Staphylococcus epidermidis | This patent | fusA-tuf spacer |
| 2249 | Staphylococcus haemolyticus | This patent | fusA-tuf spacer |
| 2255 | Abiotrophia adiacens | This patent | tuf |
| 2256 | Acinetobacter baumannii | This patent | tuf |
| 2257 | Actinomyces meyeri | This patent | tuf |
| 2258 | Clostridium difficile | This patent | tuf |
| 2259 | Corynebacterium diphtheriae | This patent | tuf |
| 2260 | Enterobacter cloacae | This patent | tuf |
| 2261 | Klebsiella pneumoniae subsp. pneumoniae | This patent | tuf |
| 2262 | Listeria monocytogenes | This patent | tuf |
| 2263 | Mycobacterium avium | This patent | tuf |
| 2264 | Mycobacterium gordonae | This patent | tuf |
| 2265 | Mycobacterium kansasii | This patent | tuf |
| 2266 | Mycobacterium terrae | This patent | tuf |
| 2267 | Neisseria polysaccharea | This patent | tuf |
| 2268 | Staphylococcus epidermidis | This patent | tuf |
| 2269 | Staphylococcus haemolyticus | This patent | tuf |
| 2270 | Aeromonas hydrophila | This patent | tuf |
| 2271 | Bilophila wadsworthia | This patent | tuf |
| 2272 | Brevundimonas diminuta | This patent | tuf |
| 2273 | Streptococcus mitis | This patent | pbp1a |
| 2274 | Streptococcus mitis | This patent | pbp1a |
| 2275 | Streptococcus mitis | This patent | pbp1a |
| 2276 | Streptococcus oralis | This patent | pbp1a |
| 2277 | Escherichia coli | This patent | gyrA |
| 2278 | Escherichia coli | This patent | gyrA |
| 2279 | Escherichia coli | This patent | gyrA |
| 2280 | Escherichia coli | This patent | gyrA |
| 2288 | Enterococcus faecium | Database | ddl |
| 2293 | Enterococcus faecium | Database | vanA |
| 2296 | Enterococcus faecalis | Database | vanB |

*tuf indicates tuf sequences, tuf (C) indicates tuf sequences divergent from main (usually A and B) copies of the elongation factor-Tu, tuf (EF-1) indicates tuf sequences of the eukaryotic type (elongation factor 1α), tuf (M) indicates tuf sequences from organellar (mostly mitochondrial) origin.
fusA indicates fusA sequences; fusA-tuf spacer indicates the intergenic region between fusA and tuf.
atpD indicates atpD sequences of the F-type, atpD (V) indicates atpD sequences of the V-type.
recA indicates recA sequences, recA(Rad51) indicates rad51 sequences or homologs and recA(Dmc1) indicates dmc1 sequences or homologs.

TABLE 8
Bacterial species used to test the specificity of the Streptococcus agalactiae-specific
amplification primers derived from tuf sequences.

| Strain | Reference number | Strain | Reference number |
|---|---|---|---|
| Streptococcus acidominimus | ATCC 51726 | Bacteroides caccae | ATCC 43185 |
| Streptococcus agalactiae | ATCC 12403 | Bacteroides vulgatus | ATCC 8482 |
| Streptococcus agalactiae | ATCC 12973 | Bacteroides fragilis | ATCC 25285 |
| Streptococcus agalactiae | ATCC 13813 | Candida albicans | ATCC 11006 |
| Streptococcus agalactiae | ATCC 27591 | Clostridium innoculum | ATCC 14501 |
| Streptococcus agalactiae | CDCs 1073 | Clostridium ramosum | ATCC 25582 |
| Streptococcus anginosus | ATCC 27335 | Lactobacillus casei subsp. casei | ATCC 393 |
| Streptococcus anginosus | ATCC 33397 | Clostridium septicum | ATCC 12464 |
| Streptococcus bovis | ATCC 33317 | Corynebacterium cervicis | NCTC 10604 |
| Streptococcus anginosus | ATCC 27823 | Corynebacterium genitalium | ATCC 33031 |
| Streptococcus cricetus | ATCC 19642 | Corynebacterium urealyticum | ATCC 43042 |
| Streptococcus cristatus | ATCC 51100 | Enterococcus faecalis | ATCC 29212 |
| Streptococcus downei | ATCC 33748 | Enterococcus faecium | ATCC 19434 |
| Streptococcus dysgalactiae | ATCC 43078 | Eubacterium lentum | ATCC 43055 |
| Streptococcus equi subsp. equi | ATCC 9528 | Eubacterium nodutum | ATCC 33099 |
| Streptococcus ferus | ATCC 33477 | Gardnerella vaginalis | ATCC 14018 |
| Streptococcus gordonii | ATCC 10558 | Lactobacillus acidophilus | ATCC 4356 |
| Streptococcus macacae | ATCC 35911 | Lactobacillus crispatus | ATCC 33820 |
| Streptococcus mitis | ATCC 49456 | Lactobacillus gasseri | ATCC 33323 |
| Streptococcus mutans | ATCC 25175 | Lactobacillus johnsonii | ATCC 33200 |
| Streptococcus oralis | ATCC 35037 | Lactococcus lactis subsp. lactis | ATCC 19435 |
| Streptococcus parasanguinis | ATCC 15912 | Lactococcus lactis subsp. lactis | ATCC 11454 |
| Streptococcus parauberis | DSM 6631 | Listeria innocua | ATCC 33090 |
| Streptococcus pneumoniae | ATCC 27336 | Micrococcus luteus | ATCC 9341 |
| Streptococcus pyogenes | ATCC 19615 | Escherichia coli | ATCC 25922 |
| Streptococcus ratti | ATCC 19645 | Micrococcus lylae | ATCC 27566 |
| Streptococcus salivarius | ATCC 7073 | Porphyromonas asaccharolytica | ATCC 25260 |
| Streptococcus sanguinis | ATCC 10556 | Prevotella corporis | ATCC 33547 |
| Streptococcus sobrinus | ATCC 27352 | Prevotella melanogenica | ATCC 25845 |
| Streptococcus suis | ATCC 43765 | Staphylococcus aureus | ATCC 13301 |
| Streptococcus uberis | ATCC 19436 | Staphylococcus epidermidis | ATCC 14990 |
| Streptococcus vestubularis | ATCC 49124 | Staphylococcus saprophyticus | ATCC 15305 |

TABLE 9
Bacterial species used to test the specificity of the
Streptococcus agalactiae-specific
amplification primers derived from atpD sequences.

| Strain | Reference number |
|---|---|
| Streptococcus acidominimus | ATCC 51726 |
| Streptococcus agalactiae | ATCC 12400 |
| Streptococcus agalactiae | ATCC 12403 |
| Streptococcus agalactiae | ATCC 12973 |
| Streptococcus agalactiae | ATCC 13813 |
| Streptococcus agalactiae | ATCC 27591 |
| Streptococcus agalactiae | CDCs-1073 |
| Streptococcus anginosus | ATCC 27335 |
| Streptococcus anginosus | ATCC 27823 |
| Streptococcus bovis | ATCC 33317 |
| Streptococcus cricetus | ATCC 19642 |
| Streptococcus cristatus | ATCC 51100 |
| Streptococcus downei | ATCC 33748 |
| Streptococcus dysgalactiae | ATCC 43078 |
| Streptococcus equi subsp. equi | ATCC 9528 |
| Streptococcus ferus | ATCC 33477 |
| Streptococcus gordonii | ATCC 10558 |
| Streptococcus macacae | ATCC 35911 |
| Streptococcus mitis | ATCC 49456 |
| Streptococcus mutans | ATCC 25175 |
| Streptococcus oralis | ATCC 35037 |
| Streptococcus parasanguinis | ATCC 15912 |
| Streptococcus parauberis | DSM 6631 |
| Streptococcus pneumoniae | ATCC 27336 |
| Streptococcus pyogenes | ATCC 19615 |
| Streptococcus ratti | ATCC 19645 |
| Streptococcus salivarius | ATCC 7073 |
| Streptococcus sanguinis | ATCC 10556 |
| Streptococcus sobrinus | ATCC 27352 |
| Streptococcus suis | ATCC 43765 |
| Streptococcus uberis | ATCC 19436 |
| Streptococcus vestibularis | ATCC 49124 |

TABLE 10
Bacterial species used to test the specificity of the Enterococcus-specific
amplification primers derived from tuf sequences.

| | |
|---|---|
| Strain | Reference number |

Gram-positive species (n = 74)

| | |
|---|---|
| Abiotrophia adiacens | ATCC 49176 |
| Abiotrophia defectiva | ATCC 49175 |
| Bacillus cereus | ATCC 14579 |
| Bacillus subtilis | ATCC 27370 |
| Bifidobacterium adolescentis | ATCC 27534 |
| Bifidobacterium breve | ATCC 15700 |
| Bifidobacterium dentium | ATCC 27534 |
| Bifidobacterium longum | ATCC 15707 |
| Clostridium perfringens | ATCC 3124 |
| Clostridium septicum | ATCC 12464 |
| Corynebacterium aquaticus | ATCC 14665 |
| Corynebacterium | ATCC 10700 |
| pseudodiphtheriticum | |
| Enterococcus avium | ATCC 14025 |
| Enterococcus casseliflavus | ATCC 25788 |
| Enterococcus cecorum | ATCC 43199 |
| Enterococcus columbae | ATCC 51263 |
| Enterococcus dispar | ATCC 51266 |
| Enterococcus durans | ATCC 19432 |
| Enterococcus faecalis | ATCC 29212 |
| Enterococcus faecium | ATCC 19434 |
| Enterococcus flavescens | ATCC 49996 |
| Enterococcus gallinarum | ATCC 49573 |
| Enterococcus hirae | ATCC 8044 |
| Enterococcus malodoratus | ATCC 43197 |
| Enterococcus mundtii | ATCC 43186 |
| Enterococcus pseudoavium | ATCC 49372 |
| Enterococcus raffinosus | ATCC 49427 |
| Enterococcus saccharolyticus | ATCC 43076 |
| Enterococcus solitarius | ATCC 49428 |
| Enterococcus sulfureus | ATCC 49903 |
| Eubacterium lentum | ATCC 49903 |
| Gemella haemolysans | ATCC 10379 |
| Gemella morbillorum | ATCC 27842 |
| Lactobacillus acidophilus | ATCC 4356 |
| Leuconostoc mesenteroides | ATCC 19225 |
| Listeria grayi | ATCC 19120 |
| Listeria grayi | ATCC 19123 |
| Listeria innocua | ATCC 33090 |
| Listeria ivanovii | ATCC 19119 |
| Listeria monocytogenes | ATCC 15313 |
| Listeria seeligeri | ATCC 35967 |
| Micrococcus luteus | ATCC 9341 |
| Pediococcus acidilacti | ATCC 33314 |
| Pediococcus pentosaceus | ATCC 33316 |
| Peptococcus niger | ATCC 27731 |
| Peptostreptococcus anaerobius | ATCC 27337 |
| Peptostreptococcus indolicus | ATCC 29247 |
| Peptostreptococcus micros | ATCC 33270 |
| Propionibacterium acnes | ATCC 6919 |
| Staphylococcus aureus | ATCC 43300 |
| Staphylococcus capitis | ATCC 27840 |
| Staphylococcus epidermidis | ATCC 14990 |
| Staphylococcus haemolyticus | ATCC 29970 |
| Staphylococcus hominis | ATCC 27844 |
| Staphylococcus lugdunensis | ATCC 43809 |
| Staphylococcus saprophyticus | ATCC 15305 |
| Staphylococcus simulans | ATCC 27848 |
| Staphylococcus warneri | ATCC 27836 |
| Streptococcus agalactiae | ATCC 13813 |
| Streptococcus anginosus | ATCC 33397 |
| Streptococcus bovis | ATCC 33317 |
| Streptococcus constellatus | ATCC 27823 |
| Streptococcus cristatus | ATCC 51100 |
| Streptococcus intermedius | ATCC 27335 |
| Streptococcus mitis | ATCC 49456 |
| Streptococcus mitis | ATCC 3639 |
| Streptococcus mutans | ATCC 27175 |
| Streptococcus parasanguinis | ATCC 15912 |
| Streptococcus pneumoniae | ATCC 27736 |
| Streptococcus pneumoniae | ATCC 6303 |
| Streptococcus pyogenes | ATCC 19615 |
| Streptococcus salivarius | ATCC 7073 |
| Streptococcus sanguinis | ATCC 10556 |
| Streptococcus suis | ATCC 43765 |

Gram-negative species (n = 39)

| | |
|---|---|
| Acidominococcus fermentans | ATCC 2508 |
| Acinetobacter baumannii | ATCC 19606 |
| Alcaligenes faecalis | ATCC 8750 |
| Anaerobiospirillum | ATCC 29305 |
| succiniproducens | |
| Anaerorhabdus furcosus | ATCC 25662 |
| Bacteroides distasonis | ATCC 8503 |
| Bacteroides thetaiotaomicron | ATCC 29741 |
| Bacteroides vulgatus | ATCC 8482 |
| Bordetella pertussis | LSPQ 3702 |
| Bulkholderia cepacia | LSPQ 2217 |
| Butyvibrio fibrinosolvens | ATCC 19171 |
| Cardiobacterium hominis | ATCC 15826 |
| Citrobacter freundii | ATCC 8090 |
| Desulfovibrio vulgaris | ATCC 29579 |
| Edwardsiellae tarda | ATCC 15947 |
| Enterobacter cloacae | ATCC 13047 |
| Escherichia coli | ATCC 25922 |
| Fusobacterium russii | ATCC 25533 |
| Haemophilus influenzae | ATCC 9007 |
| Hafnia alvei | ATCC 13337 |
| Klebsiella oxytoca | ATCC 13182 |
| Meganomonas hypermegas | ATCC 25560 |
| Mitsukoella multiacidus | ATCC 27723 |
| Moraxella catarrhalis | ATCC 43628 |
| Morganella morganii | ATCC 25830 |
| Neisseria meningitidis | ATCC 13077 |
| Pasteurella aerogenes | ATCC 27883 |
| Proteus vulgaris | ATCC 13315 |
| Providencia alcalifaciens | ATCC 9886 |
| Providencia rettgeri | ATCC 9250 |
| Pseudomonas aeruginosa | ATCC 27853 |
| Salmonella typhimurium | ATCC 14028 |
| Serratia marcescens | ATCC 13880 |
| Shigella flexneri | ATCC 12022 |
| Shigella sonnei | ATCC 29930 |
| Succinivibrio dextrinosolvens | ATCC 19716 |
| Tissierella praeacuta | ATCC 25539 |
| Veillonella parvuala | ATCC 10790 |
| Yersinia enterocolitica | ATCC 9610 |

TABLE 11
Microbial species for which tuf and/or atpD and/or recA sequences
are available in public databases.

| | | | |
|---|---|---|---|
| Species | Strain | Accession number | Coding gene* |

tuf sequences

| Bacteria | | | |
|---|---|---|---|
| Actinobacillus actinomycetemcomitans | HK1651 | Genome project² | tuf |
| Actinobacillus actinomycetemcomitans | HK1651 | Genome project² | tuf (EF-G) |
| Agrobacterium tumefaciens | | X99673 | tuf |
| Agrobacterium tumefaciens | | X99673 | tuf (EF-G) |
| Agrobacterium tumefaciens | | X99674 | tuf |
| Anacystis nidulans | PCC 6301 | X17442 | tuf |
| Aquifex aeolicus | VF5 | AE000669 | tuf |
| Aquifex aeolicus | VF5 | AE000669 | tuf (EF-G) |
| Aquifex pyrophilus | | Genome project² | tuf (EF-G) |
| Aquifex pyrophilus | | Y15787 | tuf |
| Bacillus anthracis | Ames | Genome project² | tuf |
| Bacillus anthracis | Ames | Genome project² | tuf (EF-G) |
| Bacillus halodurans | C-125 | AB017508 | tuf |
| Bacillus halodurans | C-125 | AB017508 | tuf (EF-G) |
| Bacillus stearothermophilus | CCM 2184 | AJ000260 | tuf |
| Bacillus subtilis | 168 | D64127 | tuf |
| Bacillus subtilis | 168 | D64127 | tuf (EF-G) |
| Bacillus subtilis | DSM 10 | Z99104 | tuf |
| Bacillus subtilis | DSM 10 | Z99104 | tuf (EF-G) |
| Bacteroides forsythus | ATCC 43037 | AB035466 | tuf |
| Bacteroides fragilis | DSM 1151 | —¹ | tuf |
| Bordetella bronchiseptica | RB50 | Genome project² | tuf |
| Bordetella pertussis | Tohama 1 | Genome project² | tuf |
| Bordetella pertussis | Tohama 1 | Genome project² | tuf (EF-G) |
| Borrelia burdorgferi | B31 | U78193 | tuf |
| Borrelia burgdorferi | | AE001155 | tuf (EF-G) |
| Brevibacterium linens | DSM 20425 | X76863 | tuf |
| Buchnera aphidicola | Ap | Y12307 | tuf |
| Burkholderia pseudomallei | K96243 | Genome project² | tuf (EF-G) |
| Campylobacter jejuni | NCTC 11168 | Y17167 | tuf |
| Campylobacter jejuni | NCTC 11168 | CJ11168X2 | tuf (EF-G) |
| Chlamydia pneumoniae | CWL029 | AE001592 | tuf |
| Chlamydia pneumoniae | CWL029 | AE001639 | tuf (EF-G) |
| Chlamydia trachomatis | | M74221 | tuf |
| Chlamydia trachomatis | D/UW-3/CX | AE001317 | tuf (EF-G) |
| Chlamydia trachomatis | D/UW-3/CX | AE001305 | tuf |
| Chlamydia trachomatis | F/IC-Cal-13 | L22216 | tuf |
| Chlorobium vibrioforme | DSM 263 | X77033 | tuf |
| Chloroflexus aurantiacus | DSM 636 | X76865 | tuf |
| Clostridium acetobutylicum | ATCC 824 | Genome project² | tuf |
| Clostridium difficile | 630 | Genome project² | tuf |
| Clostridium difficile | 630 | Genome project² | tuf (EF-G) |
| Corynebacterium diphtheriae | NCTC 13129 | Genome project² | tuf |
| Corynebacterium diphtheriae | NCTC 13129 | Genome project² | tuf (EF-G) |
| Corynebacterium glutamicum | ASO 19 | X77034 | tuf |
| Corynebacterium glutamicum | MJ-233 | E09634 | tuf |
| Coxiella burnetii | Nine Mile phase I | AF136604 | tuf |
| Cytophaga lytica | DSM 2039 | X77035 | tuf |
| Deinococcus radiodurans | R1 | AE001891 | tuf (EF-G) |
| Deinococcus radiodurans | R1 | AE180092 | tuf |
| Deinococcus radiodurans | R1 | AE002041 | tuf |
| Deinonema sp. | | —¹ | tuf |
| Eikenella corrodens | ATCC 23834 | Z12610 | tuf |
| Eikenella corrodens | ATCC 23834 | Z12610 | tuf (EF-G) |
| Enterococcus faecalis | | Genome project² | tuf (EF-G) |
| Escherichia coli | | J01690 | tuf |
| Escherichia coli | | J01717 | tuf |
| Escherichia coli | | X00415 | tuf (EF-G) |
| Escherichia coli | | X57091 | tuf |
| Escherichia coli | K-12 MG1655 | U00006 | tuf |
| Escherichia coli | K-12 MG1655 | U00096 | tuf |
| Escherichia coli | K-12 MG1655 | AE000410 | tuf (EF-G) |
| Fervidobacterium islandicum | DSM 5733 | Y15788 | tuf |
| Fibrobacter succinogenes | S85 | X76866 | tuf |
| Flavobacterium ferrigeneum | DSM 13524 | X76867 | tuf |
| Flexistipes sinusarabici | | X59461 | tuf |
| Gloeobacter violaceus | PCC 7421 | U09433 | tuf |
| Gloeothece sp. | PCC 6501 | U09434 | tuf |
| Haemophilus actinomycetemcomitans | HK1651 | Genome project² | tuf |
| Haemophilus ducreyi | 35000 | AF087414 | tuf (EF-G) |
| Haemophilus influenzae | Rd | U32739 | tuf |
| Haemophilus influenzae | Rd | U32746 | tuf |
| Haemophilus influenzae | Rd | U32739 | tuf (EF-G) |
| Helicobacter pylori | 26695 | AE000511 | tuf |
| Helicobacter pylori | J99 | AE001539 | tuf (EF-G) |
| Helicobacter pylori | J99 | AE001541 | tuf |
| Herpetosiphon aurantiacus | Hpga1 | X76868 | tuf |
| Klebsiella pneumoniae | M6H 78578 | Genome project² | tuf |
| Klebsiella pneumoniae | M6H 78578 | Genome project² | tuf (EF-G) |
| Lactobacillus paracasei | | E13922 | tuf |
| Legionella pneumophila | Philadelphia-1 | Genome project² | tuf |
| Leptospira interrogans | | AF115283 | tuf |
| Leptospira interrogans | | AF115283 | tuf (EF-G) |
| Micrococcus luteus | IFO 3333 | M17788 | tuf (EF-G) |
| Micrococcus luteus | IFO 3333 | M17788 | tuf |
| Moraxella sp. | TAC II 25 | AJ249258 | tuf |
| Mycobacterium avium | 104 | Genome project² | tuf |
| Mycobacterium avium | 104 | Genome project² | tuf (EF-G) |
| Mycobacterium bovis | AF2122/97 | Genome project² | tuf |
| Mycobacterium bovis | AF2122/97 | Genome project² | tuf (EF-G) |
| Mycobacterium leprae | | L13276 | tuf |
| Mycobacterium leprae | | Z14314 | tuf |
| Mycobacterium leprae | | Z14314 | tuf (EF-G) |
| Mycobacterium leprae | Thai 53 | D13869 | tuf |
| Mycobacterium tuberculosis | Erdmann | S40925 | tuf |
| Mycobacterium tuberculosis | H37Rv | AL021943 | tuf (EF-G) |
| Mycobacterium tuberculosis | H37Rv | Z84395 | tuf |
| Mycobacterium tuberculosis | y42 | AD000005 | tuf |
| Mycobacterium tuberculosis | CSU#93 | Genome project² | tuf |
| Mycobacterium tuberculosis | CSU#93 | Genome project² | tuf (EF-G) |
| Mycoplasma capricolum | PG-31 | X16462 | tuf |
| Mycoplasma genitalium | G37 | U39732 | tuf |
| Mycoplasma genitalium | G37 | U39689 | tuf (EF-G) |
| Mycoplasma hominis | | X57136 | tuf |
| Mycoplasma hominis | PG21 | M57675 | tuf |
| Mycoplasma pneumoniae | M129 | AE000019 | tuf |
| Mycoplasma pneumoniae | M129 | AE000058 | tuf (EF-G) |
| Neisseria gonorrhoeae | MS11 | L36380 | tuf |
| Neisseria gonorrhoeae | MS11 | L36380 | tuf (EF-G) |
| Neisseria meningitidis | Z2491 | Genome project² | tuf (EF-G) |
| Neisseria meningitidis | Z2491 | Genome project² | tuf |
| Pasteurella multocida | Pm70 | Genome project² | tuf |
| Peptococcus niger | DSM 20745 | X76869 | tuf |
| Phormidium ectocarpi | PCC 7375 | U09443 | tuf |
| Planobispora rosea | ATCC 53773 | U67308 | tuf |
| Planobispora rosea | ATCC 53733 | X98830 | tuf |
| Planobispora rosea | ATCC 53733 | X98830 | tuf (EF-G) |
| Plectonema boryanum | PCC 73110 | U09444 | tuf |
| Porphyromonas gingivalis | W83 | Genome project² | tuf |
| Porphyromonas gingivalis | W83 | Genome project² | tuf (EF-G) |
| Porphyromonas gingivalis | FDC 381 | AB035461 | tuf |
| Porphyromonas gingivalis | W83 | AB035462 | tuf |
| Porphyromonas gingivalis | SUNY 1021 | AB035463 | tuf |
| Porphyromonas gingivalis | A7A1-28 | AB035464 | tuf |
| Porphyromonas gingivalis | ATCC 33277 | AB035465 | tuf |
| Porphyromonas gingivalis | ATCC 33277 | AB035471 | tuf (EF-G) |
| Prochlorothrix hollandica | | U09445 | tuf |
| Pseudomonas aeruginosa | PAO-1 | Genome project² | tuf |
| Pseudomonas putida | | Genome project² | tuf |
| Rickettsia prowazekii | Madrid E | AJ235272 | tuf |
| Rickettsia prowazekii | Madrid E | AJ235270 | tuf (EF-G) |
| Rickettsia prowazekii | Madrid E | Z54171 | tuf (EF-G) |
| Salmonella choleraesuis subsp. | | X64591 | tuf (EF-G) |
| choleraesuis serotype Typhimurium | | | |
| Salmonella choleraesuis subsp. | LT2 trpE91 | X55116 | tuf |
| choleraesuis serotype Typhimurium | | | |
| Salmonella choleraesuis subsp. | LT2 trpE91 | X55117 | tuf |
| choleraesuis serotype Typhimurium | | | |
| Serpulina hyodysenteriae | B204 | U51635 | tuf |
| Serratia marcescens | | AF058451 | tuf |
| Shewanella putrefaciens | DSM 50426 | —¹ | tuf |
| Shewanella putrefaciens | MR-1 | Genome project² | tuf |
| Spirochaeta aurantia | DSM 1902 | X76874 | tuf |
| Staphylococcus aureus | | AJ237696 | tuf (EF-G) |
| Staphylococcus aureus | EMRSA-16 | Genome project² | tuf |
| Staphylococcus aureus | NCTC 8325 | Genome project² | tuf |
| Staphylococcus aureus | COL | Genome project² | tuf |
| Staphylococcus aureus | EMRSA-16 | Genome project² | tuf (EF-G) |
| Stigmatella aurantiaca | DW4 | X82820 | tuf |
| Stigmatella aurantiaca | Sg a1 | X76870 | tuf |
| Streptococcus mutans | GS-5 Kuramitsu | U75481 | tuf |
| Streptococcus mutans | UAB159 | Genome project² | tuf |
| Streptococcus oralis | NTCC 11427 | P331701 | tuf |
| Streptococcus pyogenes | | Genome project² | tuf (EF-G) |
| Streptococcus pyogenes | M1-GAS | Genome project² | tuf |
| Streptomyces aureofaciens | ATCC 10762 | AF007125 | tuf |
| Streptomyces cinnamoneus | Tue89 | X98831 | tuf |
| Streptomyces coelicolor | A3(2) | AL031013 | tuf (EF-G) |
| Streptomyces coelicolor | A3(2) | X77039 | tuf (EF-G) |
| Streptomyces coelicolor | M145 | X77039 | tuf |
| Streptomyces collinus | BSM 40733 | S79408 | tuf |
| Streptomyces netropsis | Tu1063 | AF153618 | tuf |
| Streptomyces ramocissimus | | X67057 | tuf |
| Streptomyces ramocissimus | | X67058 | tuf |
| Streptomyces ramocissimus | | X67057 | tuf (EF-G) |
| Synechococcus sp. | PCC 6301 | X17442 | tuf (EF-G) |
| Synechococcus sp. | PCC 6301 | X17442 | tuf |
| Synechocystis sp. | PCC 6803 | D90913 | tuf (EF-G) |
| Synechocystis sp. | PCC 6803 | D90913 | tuf |
| Synechocystis sp. | PCC 6803 | X65159 | tuf (EF-G) |
| Taxeobacter occealus | Myx 2105 | X77036 | tuf |
| Thermotoga maritima | | Genome project² | tuf (EF-G) |
| Thermotoga maritima | | M27479 | tuf |
| Thermus aquaticus | EP 00276 | X66322 | tuf |
| Thermus thermophilus | HB8 | X16278 | tuf (EF-G) |
| Thermus thermophilus | HB8 | X05977 | tuf |
| Thermus thermophilus | HB8 | X06657 | tuf |
| Thiomonas cuprina | DSM 5495 | U78300 | tuf |
| Thiomonas cuprina | DSM 5495 | U78300 | tuf (EF-G) |
| Thiomonas cuprina | Hoe5 | X76871 | tuf |
| Treponema denticola | | Genome project² | tuf |
| Treponema denticola | | Genome project² | tuf (EF-G) |
| Treponema pallidum | | AE001202 | tuf |
| Treponema pallidum | | AE001222 | tuf (EF-G) |
| Treponema pallidum | | AE001248 | tuf (EF-G) |
| Ureaplasma urealyticum | ATCC 33697 | Z34275 | tuf |
| Ureaplasma urealyticum | serovar 3 biovar 1 | AE002151 | tuf |
| Ureaplasma urealyticum | serovar 3 biovar 1 | AE002151 | tuf (EF-G) |
| Vibrio cholerae | N16961 | Genome project² | tuf |
| Wolinella succinogenes | DSM 1740 | X76872 | tuf |
| Yersinia pestis | CO-92 | Genome project² | tuf |
| Yersinia pestis | CO-92 | Genome project² | tuf (EF-G) |
| Archaebacteria | | | |
| Archaeoglobus fulgidus | | Genome project² | tuf (EF-G) |
| Halobacterium marismortui | | X16677 | tuf |
| Methanobacterium thermoautrophicum | delta H | AE000877 | tuf |
| Methanococcus jannaschii | ATCC 43067 | U67486 | tuf |
| Methanococcus vannielii | | X05698 | tuf |
| Pyrococcus abyssi | Orsay | AJ248285 | tuf |
| Thermoplasma acidophilum | DSM 1728 | X53866 | tuf |
| Fungi | | | |
| Absidia glauca | CBS 101.48 | X54730 | tuf (EF-1) |
| Arxula adeninivorans | Ls3 | Z47379 | tuf (EF-1) |
| Aspergillus oryzae | KBN616 | AB007770 | tuf (EF-1) |
| Aureobasidium pullulans | R106 | U19723 | tuf (EF-1) |
| Candida albicans | SC5314 | Genome project² | tuf (M) |
| Candida albicans | SC5314 | M29934 | tuf (EF-1) |
| Candida albicans | SC5314 | M29935 | tuf (EF-1) |
| Cryptococcus neoformans | B3501 | U81803 | tuf (EF-1) |
| Cryptococcus neoformans | M1-106 | U81804 | tuf (EF-1) |
| Eremothecium gossypii | ATCC 10895 | X73978 | tuf (EF-1) |
| Eremothecium gossypii | | A29820 | tuf (EF-1) |
| Fusarium oxysporum | NRRL 26037 | AF008498 | tuf (EF-1) |
| Histoplasma capsulatum | 186AS | U14100 | tuf (EF-1) |
| Podospora anserina | | X74799 | tuf (EF-1) |
| Podospora curvicolla | VLV | X96614 | tuf (EF-1) |
| Prototheca wickerhamii | 263-11 | AJ245645 | tuf (EF-1) |
| Puccinia graminis | race 32 | X73529 | tuf (EF-1) |
| Reclinomonas americana | ATCC 50394 | AF007261 | tuf (M) |
| Rhizomucor racemosus | ATCC 1216B | X17475 | tuf (EF-1) |
| Rhizomucor racemosus | ATCC 1216B | J02605 | tuf (EF-1) |
| Rhizomucor racemosus | ATCC 1216B | X17476 | tuf (EF-1) |
| Rhodotorula mucilaginosa | | AF016239 | tuf (EF-1) |
| Saccharomyces cerevisiae | | K00428 | tuf (M) |
| Saccharomyces cerevisiae | | M59369 | tuf (EF-G) |
| Saccharomyces cerevisiae | | X00779 | tuf (EF-1) |
| Saccharomyces cerevisiae | | X01638 | tuf (EF-1) |
| Saccharomyces cerevisiae | | M10992 | tuf (EF-1) |
| Saccharomyces cerevisiae | Alpha S288 | X78993 | tuf (EF-1) |
| Saccharomyces cerevisiae | | M15666 | tuf (EF-1) |
| Saccharomyces cerevisiae | | Z35987 | tuf (EF-1) |
| Saccharomyces cerevisiae | S288C (AB972) | U51033 | tuf (EF-1) |
| Schizophyllum commune | 1-40 | X94913 | tuf (EF-1) |
| Schizosaccharomyces pombe | 972h- | AL021816 | tuf (EF-1) |
| Schizosaccharomyces pombe | 972h- | AL021813 | tuf (EF-1) |
| Schizosaccharomyces pombe | 972h- | D82571 | tuf (EF-1) |
| Schizosaccharomyces pombe | | U42189 | tuf (EF-1) |
| Schizosaccharomyces pombe | PR745 | D89112 | tuf (EF-1) |
| Sordaria macrospora | OOO | X96615 | tuf (EF-1) |
| Trichoderma reesei | QM9414 | Z23012 | tuf (EF-1) |
| Yarrowia lipolytica | | AF054510 | tuf (EF-1) |
| Parasites | | | |
| Blastocystis hominis | HE87-1 | D64080 | tuf (EF-1) |
| Cryptosporidium parvum | | U69697 | tuf (EF-1) |
| Eimeria tenella | LS18 | AI755521 | tuf (EF-1) |
| Entamoeba histolytica | HM1:IMSS | X83565 | tuf (EF-1) |
| Entamoeba histolytica | NIH 200 | M92073 | tuf (EF-1) |
| Giardia lamblia | | D14342 | tuf (EF-1) |
| Kentrophoros sp. | | AF056101 | tuf (EF-1) |
| Leishmania amazonensis | IFLA/BR/67/PH8 | M92653 | tuf (EF-1) |
| Leishmania braziliensis | | U72244 | tuf (EF-1) |
| Onchocerca volvulus | | M64333 | tuf (EF-1) |
| Porphyra purpurea | Avonport | U08844 | tuf (EF-1) |
| Plasmodium berghei | ANKA | AJ224150 | tuf (EF-1) |
| Plasmodium falciparum | K1 | X60488 | tuf (EF-1) |
| Plasmodium knowlesi | line H | AJ224153 | tuf (EF-1) |
| Toxoplasma gondii | RH | Y11431 | tuf (EF-1) |
| Trichomonas tenax | ATCC 30207 | D78479 | tuf (EF-1) |
| Trypanosoma brucei | LVH/75/ | U10562 | tuf (EF-1) |
| Trypanosoma cruzi | USAMRU-K/18Y | L76077 | tuf (EF-1) |
| Human and plants | | | |
| Arabidopsis thaliana | Columbia | X89227 | tuf (EF-1) |
| Glycine max | Ceresia | X89058 | tuf (EF-1) |
| Glycine max | Ceresia | Y15107 | tuf (EF-1) |
| Glycine max | Ceresia | Y15108 | tuf (EF-1) |
| Glycine max | Maple Arrow | X66062 | tuf (EF-1) |
| Homo sapiens | | X03558 | tuf (EF-1) |
| Pyramimonas disomata | | AB008010 | tuf |

atpD sequences

| Bacteria | | | |
|---|---|---|---|
| Acetobacterium woodi | DSM 1030 | U10505 | atpD |
| Actinobacillus actinomycetemcomitans | HK1651 | Genome project² | atpD |
| Bacillus anthracis | Ames | Genome project² | atpD |
| Bacillus firmus | OF4 | M60117 | atpD |
| Bacillus megaterium | QM B1551 | M20255 | atpD |
| Bacillus stearothermophilus | | D38058 | atpD |
| Bacillus stearothermophilus | IFO1035 | D38060 | atpD |
| Bacillus subtilis | 168 | Z28592 | atpD |
| Bacteroides fragilis | DSM 2151 | M22247 | atpD |
| Bordetella bronchiseptica | RB50 | Genome project² | atpD |
| Bordetella pertussis | Tohama 1 | Genome project² | atpD |
| Borrelia burgdorferi | B31 | AE001122 | atpD (V) |
| Burkholderia cepacia | DSM50181 | X76877 | atpD |
| Burkholderia pseudomallei | K96243 | Genome project² | atpD |
| Campylobacter jejuni | NCTC 11168 | CJ11168X1 | atpD |
| Chlamydia pneumoniae | | Genome project² | atpD (V) |
| Chlamydia trachomatis | MoPn | Genome project² | atpD (V) |
| Chlorobium vibrioforme | DSM 263 | X76873 | atpD |
| Citrobacter freundii | JEO503 | AF037156 | atpD |
| Clostridium acetobutylicum | ATCC 824 | Genome project² | atpD |
| Clostridium acetobutylicum | DSM 792 | AF101055 | atpD |
| Clostridium difficile | 630 | Genome project² | atpD |
| Corynebacterium diphtheriae | NCTC13129 | Genome project² | atpD |
| Corynebacterium glutamicum | ASO 19 | X76875 | atpD |
| Corynebacterium glutamicum | MJ-233 | E09634 | atpD |
| Cytophaga lytica | DSM 2039 | M22535 | atpD |
| Enterobacter aerogenes | DSM 30053 | —³ | atpD |
| Enterococcus faecalis | V583 | Genome project² | atpD (V) |
| Enterococcus hirae | | M90060 | atpD |
| Enterococcus hirae | ATCC 9790 | D17462 | atpD (V) |
| Escherichia coli | | J01594 | atpD |
| Escherichia coli | | M25464 | atpD |
| Escherichia coli | | V00267 | atpD |
| Escherichia coli | | V00311 | atpD |
| Escherichia coli | K12 MG1655 | L10328 | atpD |
| Flavobacterium ferrugineum | DSM 13524 | —³ | atpD |
| Haemophilus actinomycetemcomitans | | Genome project² | atpD |
| Haemophilus influenzae | Rd | U32730 | atpD |
| Helicobacter pylori | NCTC 11638 | AF004014 | atpD |
| Helicobacter pylori | 26695 | Genome project² | atpD |
| Helicobacter pylori | J99 | Genome project² | atpD |
| Klebsiella pneumoniae | M6H 78578 | Genome project² | atpD |
| Lactobacillus casei | DSM 20021 | X64542 | atpD |
| Legionella pneumophila | Philadelphia-1 | Genome project² | atpD |
| Moorella thermoacetica | ATCC 39073 | U64318 | atpD |
| Mycobacterium avium | 104 | Genome project² | atpD |
| Mycobacterium bovis | AF2122/97 | Genome project² | atpD |
| Mycobacterium leprae | | U15186 | atpD |
| Mycobacterium leprae | | Genome project² | atpD |
| Mycobacterium tuberculosis | H37Rv | Z73419 | atpD |
| Mycobacterium tuberculosis | CSU#93 | Genome project² | atpD |
| Mycoplasma gallisepticum | | X64256 | atpD |
| Mycoplasma genitalium | G37 | U39725 | atpD |
| Mycoplasma pneumoniae | M129 | U43738 | atpD |
| Neisseria gonorrhoeae | FA 1090 | Genome project² | atpD |
| Neisseria meningitidis | Z2491 | Genome project² | atpD |
| Pasteurella multocida | Pm70 | Genome project² | atpD |
| Pectinatus frisingensis | DSM 20465 | X64543 | atpD |
| Peptococcus niger | DSM 20475 | X76878 | atpD |
| Pirellula marina | IFAM 1313 | X57204 | atpD |
| Porphyromonas gingivalis | W83 | Genome project² | atpD (V) |
| Propionigenium modestum | DSM 2376 | X58461 | atpD |
| Pseudomonas aeruginosa | PAO1 | Genome project² | atpD |
| Pseudomonas putida | | Genome project² | atpD |
| Rhodobacter capsulatus | B100 | X99599 | atpD |
| Rhodospirillum rubrum | | X02499 | atpD |
| Rickettsia prowazekii | F-12 | AF036246 | atpD |
| Rickettsia prowazekii | Madrid | Genome project² | atpD |
| Ruminococcus albus | 7ATCC | AB006151 | atpD |
| Salmonella bongori | JEO4162 | AF037155 | atpD |
| Salmonella bongori | BR1859 | AF037154 | atpD |
| Salmonella choleraesuis | S83769 | AF037146 | atpD |
| subsp. arizonae | | | |
| Salmonella choleraesuis | u24 | AF037147 | atpD |
| subsp. arizonae | | | |
| Salmonella choleraesuis subsp. | K228 | AF037140 | atpD |
| choleraesuis serotype Dublin | | | |
| Salmonella choleraesuis subsp. | K771 | AF037139 | atpD |
| choleraesuis serotype Dublin | | | |
| Salmonella choleraesuis subsp. | Div36-86 | AF037142 | atpD |
| choleraesuis serotype Infantis | | | |
| Salmonella choleraesuis subsp. | Div95-86 | AF037143 | atpD |
| choleraesuis serotype Tennessee | | | |
| Salmonella choleraesuis subsp. | LT2 | AF037141 | atpD |
| choleraesuis serotype Typhimurium | | | |
| Salmonella choleraesuis | DS210/89 | AF037149 | atpD |
| subsp. diarizonae | | | |
| Salmonella choleraesuis | JEO307 | AF037148 | atpD |
| subsp. diarizonae | | | |
| Salmonella choleraesuis | S109671 | AF037150 | atpD |
| subsp. diarizonae | | | |
| Salmonella choleraesuis | S84366 | AF037151 | atpD |
| subsp. houtenae | | | |
| Salmonella choleraesuis | S84098 | AF037152 | atpD |
| subsp. houtenae | | | |
| Salmonella choleraesuis | BR2047 | AF037153 | atpD |
| subsp. indica | | | |
| Salmonella choleraesuis | NSC72 | AF037144 | atpD |
| subsp. salamae | | | |
| Salmonella choleraesuis | S114655 | AF037145 | atpD |
| subsp. salamae | | | |
| Shewanella putrefaciens | MR-1 | Genome project² | atpD |
| Staphylococcus aureus | COL | Genome project² | atpD |
| Stigmatella aurantiaca | Sga1 | X76879 | atpD |
| Streptococcus bovis | JB-1 | AB009314 | atpD |
| Streptococcus mutans | GS-5 | U31170 | atpD |
| Streptococcus mutans | UAB159 | Genome project² | atpD |
| Streptococcus pneumoniae | Type 4 | Genome project² | atpD (V) |
| Streptococcus pneumoniae | Type 4 | Genome project² | atpD |
| Streptococcus pyogenes | M1-GAS | Genome project² | atpD (V) |
| Streptococcus pyogenes | M1-GAS | Genome project² | atpD |
| Streptococcus sanguinis | 10904 | AF001955 | atpD |
| Streptomyces lividans | 1326 | Z22606 | atpD |
| Thermus thermophilus | HB8 | D63799 | atpD (V) |
| Thiobacillus ferrooxidans | ATCC 33020 | M81087 | atpD |
| Treponema pallidum | Nichols | AE001228 | atpD (V) |
| Vibrio alginolyticus | | X16050 | atpD |
| Vibrio cholerae | N16961 | Genome project² | atpD |
| Wolinella succinogenes | DSM 1470 | X76880 | atpD |
| Yersinia enterocolitica | NCTC 10460 | AF037157 | atpD |
| Yersinia pestis | CO-92 | Genome project² | atpD |
| Archaebacteria | | | |
| Archaeoglobus fulgidus | DSM 4304 | AE001023 | atpD (V) |
| Halobacterium salinarum | | S56356 | atpD (V) |
| Haloferax volcanii | WR 340 | X79516 | atpD |
| Methanococcus jannaschii | DSM 2661 | U67477 | atpD (V) |
| Methanosarcina barkeri | DSM 800 | J04836 | atpD (V) |
| Fungi | | | |
| Candida albicans | SC5314 | Genome project² | atpD |
| Candida tropicalis | | M64984 | atpD (V) |
| Kluyveromyces lactis | 2359/152 | U37764 | atpD |
| Neurospora crassa | | X53720 | atpD |
| Saccharomyces cerevisiae | | M12082 | atpD |
| Saccharomyces cerevisiae | X2180-1A | J05409 | atpD (V) |
| Schizosaccharomyces pombe | 972 h- | S47814 | atpD (V) |
| Schizosaccharomyces pombe | 972 h- | M57956 | atpD |
| Parasites | | | |
| Giardia lamblia | WB | U18938 | atpD |
| Plasmodium falciparum | 3D7 | L08200 | atpD (V) |
| Trypanosoma congolense | IL3000 | Z25814 | atpD (V) |
| Human and plants | | | |
| Homo sapiens | | L09234 | atpD (V) |
| Homo sapiens | | M27132 | atpD |

recA sequences

| Bacteria | | | |
|---|---|---|---|
| Acetobacter aceti | no. 1023 | S60630 | recA |
| Acetobacter altoacetigenes | MH-24 | E05290 | recA |
| Acetobacter polyoxogenes | NBI 1028 | D13183 | recA |
| Acholeplasma laidlawii | 8195 | M81465 | recA |
| Acidiphilium facilis | ATCC 35904 | D16538 | recA |
| Acidothermus cellulolyticus | ATCC 43068 | AJ006705 | recA |
| Acinetobacter calcoaceticus | BD413/ADP1 | L26100 | recA |
| Actinobacillus actinomycetemcomitans | HK1651 | Genome project² | recA |
| Aeromonas salmonicida | A449 | U83688 | recA |
| Agrobacterium tumefaciens | C58 | L07902 | recA |
| Allochromatium vinosum | | AJ000677 | recA |
| Aquifex aeolicus | VF5 | AE000775 | recA |
| Aquifex pyrophilus | Kol5a | L23135 | recA |
| Azotobacter vinelandii | | S96898 | recA |
| Bacillus stearothermophilus | 10 | Genome project² | recA |
| Bacillus subtilis | PB1831 | U87792 | recA |
| Bacillus subtilis | 168 | Z99112 | recA |
| Bacteroides fragilis | | M63029 | recA |
| Bifidobacterium breve | NCFB 2258 | AF094756 | recA |
| Blastochloris viridis | DSM 133 | AF022175 | recA |
| Bordetella pertussis | 165 | X53457 | recA |
| Bordetella pertussis | Tohama I | Genome project² | recA |
| Borrelia burgdorferi | Sh-2-82 | U23457 | recA |
| Borrelia burgdorferi | B31 | AE001124 | recA |
| Brevibacterium flavum | MJ-233 | E10390 | recA |
| Brucella abortus | 2308 | L00679 | recA |
| Burkholderia cepacia | ATCC 17616 | U70431 | recA |
| Burkholderia cepacia | | D90120 | recA |
| Burkholderia pseudomallei | K96243 | Genome project² | recA |
| Campylobacter fetus subsp. fetus | 23D | AF020677 | recA |
| Campylobacter jejuni | 81-176 | U03121 | recA |
| Campylobacter jejuni | NCTC 11168 | AL139079 | recA |
| Chlamydia trachomatis | L2 | U16739 | recA |
| Chlamydia trachomatis | D/UW-3/CX | AE001335 | recA |
| Chlamydophila pneumoniae | CWL029 | AE001658 | recA |
| Chloroflexus aurantiacus | J-10-fl | AF037259 | recA |
| Clostridium acetobutylicum | | M94057 | recA |
| Clostridium perfringens | 13 | U61497 | recA |
| Corynebacterium diphtheriae | NCTC13129 | Genome project² | recA |
| Corynebacterium glutamicum | AS019 | U14965 | recA |
| Corynebacterium pseudotuberculosis | C231 | U30387 | recA |
| Deinococcus radiodurans | KD8301 | AB005471 | recA |
| Deinococcus radiodurans | R1 | U01876 | recA |
| Enterobacter agglomerans | 339 | L03291 | recA |
| Enterococcus faecalis | OGIX | M81466 | recA |
| Erwinia carotovora | | X55554 | recA |
| Escherichia coli | | J01672 | recA |
| Escherichia coli | | X55552 | recA |
| Escherichia coli | K-12 | AE000354 | recA |
| Frankia alni | Arl3 | AJ006707 | recA |
| Gluconobacter oxydans | | U21001 | recA |
| Haemophilus influenzae | Rd | U32687 | recA |
| Haemophilus influenzae | Rd | U32741 | recA |
| Haemophilus influenzae | Rd | L07529 | recA |
| Helicobacter pylori | 69A | Z35478 | recA |
| Helicobacter pylori | 26695 | AE000536 | recA |
| Helicobacter pylori | J99 | AE001453 | recA |
| Klebsiella pneumoniae | M6H 78578 | Genome project² | recA |
| Lactococcus lactis | ML3 | M88106 | recA |
| Legionella pneumophila | | X55453 | recA |
| Leptospira biflexa | serovar patoc | U32625 | recA |
| Leptospira interrogans | serovar pomona | U29169 | recA |
| Magnetospirillum magnetotacticum | MS-1 | X17371 | recA |
| Methylobacillus flagellatus | MFK1 | M35325 | recA |
| Methylomonas clara | ATCC 31226 | X59514 | recA |
| Mycobacterium avium | 104 | Genome project² | recA |
| Mycobacterium bovis | AF122/97 | Genome project² | recA |
| Mycobacterium leprae | | X73822 | recA |
| Mycobacterium tuberculosis | H37Rv | X58485 | recA |
| Mycobacterium tuberculosis | CSU#93 | Genome project² | recA |
| Mycoplasma genitalium | G37 | U39717 | recA |
| Mycoplasma mycoides | GM9 | L22073 | recA |
| Mycoplasma pneumoniae | ATCC 29342 | MPAE000033 | recA |
| Mycoplasma pulmonis | KD735 | L22074 | recA |
| Myxococcus xanthus | | L40368 | recA |
| Myxococcus xanthus | | L40367 | recA |
| Neisseria animalis | NCTC 10212 | U57910 | recA |
| Neisseria cinerea | LCDC 81-176 | AJ223869 | recA |
| Neisseria cinerea | LNP 1646 | U57906 | recA |
| Neisseria cinerea | NCTC 10294 | AJ223871 | recA |
| Neisseria cinerea | Vedros M601 | AJ223870 | recA |
| Neisseria elongata | CCUG 2131 | AJ223882 | recA |
| Neisseria elongata | CCUG 4165A | AJ223880 | recA |
| Neisseria elongata | NCTC 10660 | AJ223881 | recA |
| Neisseria elongata | NCTC 11050 | AJ223878 | recA |
| Neisseria elongata | NHITCC 2376 | AJ223877 | recA |
| Neisseria elongata | CCUG 4557 | AJ223879 | recA |
| subsp. intermedia | | | |
| Neisseria flava | Bangor 9 | AJ223873 | recA |
| Neisseria flavescens | LNP 444 | U57907 | recA |
| Neisseria gonorrhoeae | CH95 | U57902 | recA |
| Neisseria gonorrhoeae | FA19 | X64842 | recA |
| Neisseria gonorrhoeae | MS11 | X17374 | recA |
| Neisseria gonorrhoeae | | Genome project² | recA |
| Neisseria lactamica | CCUC 7757 | AJ223866 | recA |
| Neisseria lactamica | CCUG 7852 | Y11819 | recA |
| Neisseria lactamica | LCDC 77-143 | Y11818 | recA |
| Neisseria lactamica | LCDC 80-111 | AJ223864 | recA |
| Neisseria lactamica | LCDC 845 | AJ223865 | recA |
| Neisseria lactamica | NCTC 10617 | U57905 | recA |
| Neisseria lactamica | NCTC 10618 | AJ223863 | recA |
| Neisseria meningitidis | 44/46 | X64849 | recA |
| Neisseria meningitidis | Bangor 13 | AJ223868 | recA |
| Neisseria meningitidis | HF116 | X64848 | recA |
| Neisseria meningitidis | HF130 | X64844 | recA |
| Neisseria meningitidis | HF46 | X64847 | recA |
| Neisseria meningitidis | M470 | X64850 | recA |
| Neisseria meningitidis | N94II | X64846 | recA |
| Neisseria meningitidis | NCTC 8249 | AJ223867 | recA |
| Neisseria meningitidis | P63 | X64845 | recA |
| Neisseria meningitidis | S3446 | U57903 | recA |
| Neisseria meningitidis | FAM18 | Genome project² | recA |
| Neisseria mucosa | LNP 405 | U57908 | recA |
| Neisseria mucosa | Vedros M1801 | AJ223875 | recA |
| Neisseria perflava | CCUG 17915 | AJ223876 | recA |
| Neisseria perflava | LCDC 85402 | AJ223862 | recA |
| Neisseria pharyngis var. flava | NCTC 4590 | U57909 | recA |
| Neisseria polysaccharea | CCUG 18031 | Y11815 | recA |
| Neisseria polysaccharea | CCUG 24845 | Y11816 | recA |
| Neisseria polysaccharea | CCUG 24846 | Y11814 | recA |
| Neisseria polysaccharea | INS MA 3008 | Y11817 | recA |
| Neisseria polysaccharea | NCTC 11858 | U57904 | recA |
| Neisseria sicca | NRL 30016 | AJ223872 | recA |
| Neisseria subflava | NRL 30017 | AJ223874 | recA |
| Paracoccus denitrificans | DSM 413 | U59631 | recA |
| Pasteurella multocida | | X99324 | recA |
| Porphyromonas gingivalis | W83 | U70054 | recA |
| Prevotella ruminicola | JCM 8958 | U61227 | recA |
| Proteus mirabilis | pG1300 | X14870 | recA |
| Proteus vulgaris | | X55555 | recA |
| Pseudomonas aeruginosa | | X05691 | recA |
| Pseudomonas aeruginosa | PAM 7 | X52261 | recA |
| Pseudomonas aeruginosa | PAO12 | D13090 | recA |
| Pseudomonas fluorescens | OE 28.3 | M96558 | recA |
| Pseudomonas putida | | L12684 | recA |
| Pseudomonas putida | PpS145 | U70864 | recA |
| Rhizobium leguminosarum | VF39 | X59956 | recA |
| biovar viciae | | | |
| Rhizobium phaseoli | CNPAF512 | X62479 | recA |
| Rhodobacter capsulatus | J50 | X82183 | recA |
| Rhodobacter sphaeroides | 2.4.1 | X72705 | recA |
| Rhodopseudomonas palustris | N 7 | D84467 | recA |
| Rickettsia prowazekii | Madrid E | AJ235273 | recA |
| Rickettsia prowazekii | Madrid E | U01959 | recA |
| Serratia marcescens | | M22935 | recA |
| Shigella flexneri | | X55553 | recA |
| Shigella sonnei | KNIH104S | AF101227 | recA |
| Sinorhizobium meliloti | 2011 | X59957 | recA |
| Staphylococcus aureus | | L25893 | recA |
| Streptococcus gordonii | Challis V288 | L20574 | recA |
| Streptococcus mutans | UA96 | M81468 | recA |
| Streptococcus mutans | GS-5 | M61897 | recA |
| Streptococcus pneumoniae | | Z17307 | recA |
| Streptococcus pneumoniae | R800 | Z34303 | recA |
| Streptococcus pyogenes | NZ131 | U21934 | recA |
| Streptococcus pyogenes | D471 | M81469 | recA |
| Streptococcus salivarius | | M94062 | recA |
| subsp. thermophilus | | | |
| Streptomyces ambofaciens | DSM 40697 | Z30324 | recA |
| Streptomyces coelicolor | A3(2) | AL020958 | recA |
| Streptomyces lividans | TK24 | X76076 | recA |
| Streptomyces rimosus | R6 | X94233 | recA |
| Streptomyces venezuelae | ATCC10712 | U04837 | recA |
| Synechococcus sp. | PR6 | M29495 | recA |
| Synechocystis sp. | PCC6803 | D90917 | recA |
| Thermotoga maritima | | L23425 | recA |
| Thermotoga maritima | | AE001823 | recA |
| Thermus aquaticus | | L20095 | recA |
| Thermus thermophilus | HB8 | D17392 | recA |
| Thiobacillus ferrooxidans | | M26933 | recA |
| Treponema denticola | | Genome project² | recA |
| Treponema pallidum | Nichols | AE001243 | recA |
| Vibrio anguillarum | | M80525 | recA |
| Vibrio cholerae | 017 | X71969 | recA |
| Vibrio cholerae | 2740-80 | U10162 | recA |
| Vibrio cholerae | 569B | L42384 | recA |
| Vibrio cholerae | M549 | AF117881 | recA |
| Vibrio cholerae | M553 | AF117882 | recA |
| Vibrio cholerae | M645 | AF117883 | recA |
| Vibrio cholerae | M793 | AF117878 | recA |
| Vibrio cholerae | M794 | AF117880 | recA |
| Vibrio cholerae | M967 | AF117879 | recA |
| Xanthomonas citri | XW47 | AF006590 | recA |
| Xanthomonas oryzae | | AF013600 | recA |
| Xenorhabdus bovienii | T228/1 | U87924 | recA |
| Xenorhabdus nematophilus | AN6 | AF127333 | recA |
| Yersinia pestis | 231 | X75336 | recA |
| Yersinia pestis | CO-92 | Genome project² | recA |
| Fungi, parasites, human and plants | | | |
| Anabaena variabilis | ATCC 29413 | M29680 | recA |
| Arabidopsis thaliana | | U43652 | recA (Rad51) |
| Candida albicans | | U39808 | recA (Dmc1) |
| Coprinus cinereus | Okayama-7 | U21905 | recA (Rad51) |
| Emericella nidulans | | Z80341 | recA (Rad51) |
| Gallus gallus | | L09655 | recA (Rad51) |
| Homo sapiens | | D13804 | recA (Rad51) |
| Homo sapiens | | D63882 | recA (Dmc1) |
| Leishmania major | Friedlin | AF062379 | recA (Rad51) |
| Leishmania major | Friedlin | AF062380 | recA (Dmc1) |
| Mus musculus | | D58419 | recA (Dmc1) |
| Neurospora crassa | 74-OR23-1A | D29638 | recA (Rad51) |
| Saccharomyces cerevisiae | | D10023 | recA (Rad51) |
| Schizosaccharomyces pombe | | Z22691 | recA (Rad51) |
| Schizosaccharomyces pombe | 972h- | AL021817 | recA (Dmc1) |
| Tetrahymena thermophila | PB9R | AF064516 | recA (Rad51) |
| Trypanosoma brucei | stock 427 | Y13144 | recA (Rad51) |
| Ustilago maydis | | U62484 | recA (Rad51) |
| Xenopus laevis | | D38488 | recA (Rad51) |
| Xenopus laevis | | D38489 | recA (Rad51) |

*tuf indicates tuf sequences, including tuf genes, fusA genes and fusA-tuf intergenic spacers. tuf (C) indicates tuf sequences divergent from main (usually A and B) copies of the elongation factor-Tu tuf (EF-1) indicates tuf sequences of the eukaryotic type (elongation factor 1α) tuf (M) indicates tuf sequences from organellar (mostly mitochondrial) origin atpD indicates atpD sequences of the F-type atpD (V) indicates atpD sequences of the V-Type recA indicates recA sequences recA (Rad51) indicates rad51 sequences or homologs recA (Dmc1) indicates dmc1 sequences or homologs
¹Nucleotides sequences published in Arch. Microbiol. 1990 153: 241-247
²These sequences are from theTIGR database (http://www.tigr.org/tdb/tdb.html)
³Nucleotides sequences published in FEMS Microbiology Letters 1988 50: 101-106

TABLE 12
Bacterial species used to test the specificity of the Staphylococcus-specific
amplification primers derived from tuf sequences.

| | |
|---|---|
| Strain | Reference number |

Staphylococcal species (n = 27)

| | |
|---|---|
| Staphylococcus arlettae | ATCC 43957 |
| Staphylococcus aureus | ATCC 35844 |
| subsp. anaerobius | |
| Staphylococcus aureus | ATCC 43300 |
| subsp. aureus | |
| Staphylococcus auricularis | ATCC 33753 |
| Staphylococcus capitis | ATCC 27840 |
| subsp. capitis | |
| Staphylococcus caprae | ATCC 35538 |
| Staphylococcus carnosus | ATCC 51365 |
| Staphylococcus chromogenes | ATCC 43764 |
| Staphylococcus cohnii | DSM 20260 |
| subsp. urealyticum | |
| Staphylococcus delphini | ATCC 49171 |
| Staphylococcus epidermidis | ATCC 14990 |
| Staphylococcus equorum | ATCC 43958 |
| Staphylococcus felis | ATCC 49168 |
| Staphylococcus gallinarum | ATCC 35539 |
| Staphylococcus haemolyticus | ATCC 29970 |
| Staphylococcus hominis | ATCC 27844 |
| Staphylococcus hyicus | ATCC 11249 |
| Staphylococcus intermedius | ATCC 29663 |
| Staphylococcus kloosis | ATCC 43959 |
| Staphylococcus lentus | ATCC 29070 |
| Staphylococcus lugdunensis | ATCC 43809 |
| Staphylococcus saprophyticus | ATCC 15305 |
| Staphylococcus schleiferi | ATCC 49545 |
| subsp. coagulans | |
| Staphylococcus sciuri | ATCC 29060 |
| subsp. sciuri | |
| Staphylococcus simulans | ATCC 27848 |
| Staphylococcus warneri | ATCC 27836 |
| Staphylococcus xylosus | ATCC 29971 |

Gram-negative bacteria (n = 33)

| | |
|---|---|
| Acinetobacter baumannii | ATCC 19606 |
| Bacteroides distasonis | ATCC 8503 |
| Bacteroides fragilis | ATCC 25285 |
| Bulkholderia cepacia | ATCC 25416 |
| Bordetella pertussis | ATCC 9797 |
| Citrobacter freundii | ATCC 8090 |
| Enterobacter aerogenes | ATCC 13048 |
| Enterobacter cloacae | ATCC 13047 |
| Escherichia coli | ATCC 25922 |
| Haemophilus influenzae | ATCC 8907 |
| Haemophilus parahaemolyticus | ATCC 10014 |
| Haemophilus parainfluenzae | ATCC 7901 |
| Hafnia alvei | ATCC 13337 |
| Kingella indologenes | ATCC 25869 |
| Klebsiella oxytoca | ATCC 13182 |
| Klebsiella pneumoniae | ATCC 13883 |
| Moraxella catarrhalis | ATCC 25240 |
| Morganella morganii | ATCC 25830 |
| Neisseria gonorrhoeae | ATCC 35201 |
| Neisseria meningitidis | ATCC 13077 |
| Proteus mirabilis | ATCC 25933 |
| Proteus vulgaris | ATCC 13315 |
| Providencia rettgeri | ATCC 9250 |
| Providencia stuartii | ATCC 29914 |
| Pseudomonas aeruginosa | ATCC 27853 |
| Pseudomonas fluorencens | ATCC 13525 |
| Salmonella choleraesuis | ATCC 7001 |
| Salmonella typhimurium | ATCC 14028 |
| Serratia marcescens | ATCC 8100 |
| Shigella flexneri | ATCC 12022 |
| Shigella sonnei | ATCC 29930 |
| Stenotrophomonas maltophilia | ATCC 13843 |
| Yersinia enterocolitica | ATCC 9610 |

Other Gram-positive bacteria (n = 20)

| | |
|---|---|
| Bacillus subtilis | ATCC 27370 |
| Enterococcus avium | ATCC 14025 |
| Enterococcus durans | ATCC 19432 |
| Enterococcus faecalis | ATCC 19433 |
| Enterococcus faecium | ATCC 19434 |
| Enterococcus flavescens | ATCC 49996 |
| Enterococcus gallinarum | ATCC 49573 |
| Lactobacillus acidophilus | ATCC 4356 |
| Lactococcus lactis | ATCC 11454 |
| Listeria innocua | ATCC 33090 |
| Listeria ivanovii | ATCC 19119 |
| Listeria monocytogenes | ATCC 15313 |
| Macrococcus caseolyticus | ATCC 13548 |
| Streptococcus agalactiae | ATCC 13813 |
| Streptococcus anginosus | ATCC 33397 |
| Streptococcus bovis | ATCC 33317 |
| Streptococcus mutans | ATCC 25175 |
| Streptococcus pneumoniae | ATCC 6303 |
| Streptococcus pyogenes | ATCC 19615 |
| Streptococcus salivarius | ATCC 7073 |

TABLE 13
Bacterial species used to test the specificity of the penicillin-resistant
Streptococcus pneumoniae assay.

| | |
|---|---|
| Strain | Reference number |

Gram-positive species (n = 67)

| | |
|---|---|
| Abiotrophia adiacens | ATCC 49175 |
| Abiotrophia defectiva | ATCC 49176 |
| Actinomyces pyogenes | ATCC 19411 |
| Bacillus anthracis | ATCC 4229 |
| Bacillus cereus | ATCC 14579 |
| Bifidobacterium breve | ATCC 15700 |
| Clostridium difficile | ATCC 9689 |
| Enterococcus avium | ATCC 14025 |
| Enterococcus casseliflavus | ATCC 25788 |
| Enterococcus dispar | ATCC 51266 |
| Enterococcus durans | ATCC 19432 |
| Enterococcus faecalis | ATCC 29212 |
| Enterococcus faecium | ATCC 19434 |
| Enterococcus flavescens | ATCC 49996 |
| Enterococcus gallinarum | ATCC 49573 |
| Enterococcus hirae | ATCC 8043 |
| Enterococcus mundtii | ATCC 43186 |
| Enterococcus raffinosus | ATCC 49427 |
| Lactobacillus lactis | ATCC 19435 |
| Lactobacillus monocytogenes | ATCC 15313 |
| Mobiluncus curtisii | ATCC 35242 |
| Peptococcus niger | ATCC 27731 |
| Peptostreptococcus acones | ATCC 6919 |
| Peptostreptococcus anaerobius | ATCC 27337 |
| Peptostreptococcus | ATCC 2639 |
| asaccharolyticus | |
| Peptostreptococcus lactolyticus | ATCC 51172 |
| Peptostreptococcus magnus | ATCC 15794 |
| Peptostreptococcus prevotii | ATCC 9321 |
| Peptostreptococcus tetradius | ATCC 35098 |
| Staphylococcus aureus | ATCC 25923 |
| Staphylococcus capitis | ATCC 27840 |
| Staphylococcus epidermidis | ATCC 14990 |
| Staphylococcus haemolyticus | ATCC 29970 |
| Staphylococcus hominis | ATCC 27844 |
| Staphylococcus lugdunensis | ATCC 43809 |
| Staphylococcus saprophyticus | ATCC 15305 |
| Staphylococcus simulans | ATCC 27848 |
| Staphylococcus. warneri | ATCC 27836 |
| Streptococcus acidominimus | ATCC 51726 |
| Streptococcus agalactiae | ATCC 12403 |
| Streptococcus anginosus | ATCC 33397 |
| Streptococcus bovis | ATCC 33317 |
| Streptococcus constellatus | ATCC 27823 |
| Streptococcus cricetus | ATCC 19624 |
| Streptococcus cristatus | ATCC 51100 |
| Streptococcus downei | ATCC 33748 |
| Streptococcus dysgalactiae | ATCC 43078 |
| Streptococcus equi | ATCC 9528 |
| Streptococcus ferus | ATCC 33477 |
| Streptococcus gordonii | ATCC 10558 |
| Streptococcus intermedius | ATCC 27335 |
| Streptococcus mitis | ATCC 903 |
| Streptococcus mitis | LSPQ 2583 |
| Streptococcus mitis | ATCC 49456 |
| Streptococcus mutans | ATCC 27175 |
| Streptococcus oralis | ATCC 10557 |
| Streptococcus oralis | ATCC 9811 |
| Streptococcus oralis | ATCC 35037 |
| Streptococcus parasanguinis | ATCC 15912 |
| Streptococcus parauberis | ATCC 6631 |
| Streptococcus rattus | ATCC 15912 |
| Streptococcus salivarius | ATCC 7073 |
| Streptococcus sanguinis | ATCC 10556 |
| Streptococcus suis | ATCC 43765 |
| Streptococcus uberis | ATCC 19436 |
| Streptococcus vestibularis | ATCC 49124 |

Gram-negative species (n = 33)

| | |
|---|---|
| Actinetobacter baumannii | ATCC 19606 |
| Bordetella pertussis | ATCC 9797 |
| Citrobacter diversus | ATCC 27028 |
| Citrobacter freundii | ATCC 8090 |
| Enterobacter aerogenes | ATCC 13048 |
| Enterobacter agglomerans | ATCC 27155 |
| Enterobacter cloacae | ATCC 13047 |
| Escherichia coli | ATCC 25922 |
| Haemophilus ducreyi | ATCC 33940 |
| Haemophilus haemolyticus | ATCC 33390 |
| Haemophilus influenzae | ATCC 9007 |
| Haemophilus parainfluenzae | ATCC 7901 |
| Hafnia alvei | ATCC 13337 |
| Klebsiella oxytoca | ATCC 13182 |
| Klebsiella pneumoniae | ATCC 13883 |
| Moraxella atlantae | ATCC 29525 |
| Moraxella catarrhalis | ATCC 43628 |
| Moraxella morganii | ATCC 13077 |
| Neisseria gonorrhoeae | ATCC 35201 |
| Neisseria meningitidis | ATCC 13077 |
| Proteus mirabilis | ATCC 25933 |
| Proteus vulgaris | ATCC 13315 |
| Providencia alcalifaciens | ATCC 9886 |
| Providencia rettgeri | ATCC 9250 |
| Providencia rustigianii | ATCC 33673 |
| Providencia stuartii | ATCC 33672 |
| Pseudomonas aeruginosa | ATCC 35554 |
| Pseudomonas fluorescens | ATCC 13525 |
| Pseudomonas stutzeri | ATCC 17588 |
| Salmonella typhimurium | ATCC 14028 |
| Serratia marcescens | ATCC 13880 |
| Shigella flexneri | ATCC 12022 |
| Yersina enterocolitica | ATCC 9610 |

TABLE 14
Bacterial species (n = 104) detected by the platelet contaminants assay.

Abiotrophia adiacens
Abiotrophia defective
Acinetobacter baumannii
Acinetobacter lwoffi
Aerococcus viridans
Bacillus anthracis

[symbol]

[symbol]

Brucella abortus
Burkholderia cepacia
Citrobacter diversus
Citrobacter freundii
Enterobacter aerogenes
Enterobacter agglomerans

[symbol]

Enterococcus avium
Enterococcus casseliflavus
Enterococcus dispar
Enterococcus durans
Enterococcus faecalis
Enterococcus faecium
Enterococcus flavescens
Enterococcus gallinarum
Enterococcus mundtii
Enterococcus raffinosus
Enterococcus solitarius

[symbol]

Gemella morbillorum
Haemophilus ducreyi
Haemophilus haemolyticus
Haemophilus influenzae
Haemophilus parahaemolyticus
Haemophilus parainfluenzae
Hafnia alvei
Kingella kingae

[symbol]

[symbol]

Legionella pneumophila
Megamonas hypermegale
Moraxella atlantae
Moraxella catarrhalis
Morganella morganii
Neisseria gonorrheae
Neisseria meningitidis
Pasteurella aerogenes
Pasteurella multocida
Peptostreptococcus magnus
Proteus mirabilis
Providencia alcalifaciens
Providencia rettgeri
Providencia rustigianii
Providencia stuartii

[symbol]

Pseudomonas fluorescens
Pseudomonas stutzeri
Salmonella bangori

[symbol]

Salmonella enteritidis
Salmonella gallinarum
Salmonella typhimurium
Serratia liquefaciens

[symbol]

Shigella flexneri
Shigella sonnei

[symbol]

Staphylococcus capitis

[symbol]

Staphylococcus haemolyticus
Staphylococcus hominis
Staphylococcus lugdunensis
Staphylococcus saprophyticus
Staphylococcus simulans
Staphylococcus warneri
Stenotrophomonas maltophilia
Streptococcus acidominimus

[symbol]

Streptococcus anginosus
Streptococcus bovis
Streptococcus constellatus
Streptococcus cricetus
Streptococcus cristatus
Streptococcus dysgalactiae
Streptococcus equi
Streptococcus ferus
Streptococcus gordonii
Streptococcus intermedius
Streptococcus macacae
Streptococcus mitis

[symbol]

Streptococcus oralis
Streptococcus parasanguinis
Streptococcus parauberis
Streptococcus pneumoniae

[symbol]

Streptococcus ratti

[symbol]

[symbol]

Streptococcus sobrinus
Streptococcus uberis
Streptococcus vestibularis
Vibrio cholerae
Yersinia enterocolitica
Yersinia pestis

[symbol]

Bold characters indicate the major bacterial contaminants found in platelet concentrates.

TABLE 15
Microorganisms identified by commercial systems¹.

Abiotrophia adiacens (Streptococcus
adjacens)
Abiotrophia defectiva (Streptococcus
defectivus)
Achromobacter species
Acidaminococcus fermentans
Acinetobacter alcaligenes
Acinetobacter anitratus
Acinetobacter baumannii
Acinetobacter calcoaceticus
Acinetobacter calcoaceticus biovar
anitratus
Acinetobacter calcoaceticus biovar
lwoffi
Acinetobacter genomospecies
Acinetobacter haemolyticus
Acinetobacter johnsonii
Acinetobacter junii
Acinetobacter lwoffii
Acinetobacter radioresistens
Acinetobacter species
Actinobacillus
actinomycetemcomitans
Actinobacillus capsulatus
Actinobacillus equuli
Actinobacillus hominis
Actinobacillus lignieresii
Actinobacillus pleuropneumoniae
Actinobacillus species
Actinobacillus suis
Actinobacillus ureae
Actinomyces bovis
Actinomyces israelii
Actinomyces meyeri
Actinomyces naeslundii
Actinomyces neuii subsp. anitratus
Actinomyces neuii subsp. neuii
Actinomyces odontolyticus
Actinomyces pyogenes
Actinomyces radingae
Actinomyces species
Actinomyces turicensis
Actinomyces viscosus
Aerococcus species
Aerococcus viridans
Aeromonas caviae
Aeromonas hydrophila
Aeromonas hydrophila group
Aeromonas jandaei
Aeromonas salmonicida
Aeromonas salmonicida subsp.
achromogenes
Aeromonas salmonicida subsp.
masoucida
Aeromonas salmonicida subsp.
salmonicida
Aeromonas schubertii
Aeromonas sobria
Aeromonas species
Aeromonas trota
Aeromonas veronii
Aeromonas veronii biovar sobria
Aeromonas veronii biovar veronii
Agrobacterium radiobacter
Agrobacterium species
Agrobacterium tumefaciens
Alcaligenes denitrificans
Alcaligenes faecalis
Alcaligenes odorans
Alcaligenes odorans (Alcaligenes
faecalis)
Alcaligenes species
Alcaligenes xylosoxidans
Alcaligenes xylosoxidans subsp.
denitrificans
Alcaligenes xylosoxidans subsp.
xylosoxidans
Alloiococcus otitis
Anaerobiospirillum succiniciproducens
Anaerovibrio lipolytica
Arachnia propionica
Arcanobacterium (Actinomyces)
bemardiae
Arcanobacterium (Actinomyces)
pyogenes
Arcanobacterium haemolyticum
Arcobacter cryaerophilus
(Campylobacter cryaerophila)
Arthrobacter globiformis
Arthrobacter species
Arxiozyma telluris (Torulopsis
pintolopesii)
Atopobium minutum (Lactobacillus
minutus)
Aureobacterium species
Bacillus amyloliquefaciens
Bacillus anthracis
Bacillus badius
Bacillus cereus
Bacillus circulans
Bacillus coagulans
Bacillus firmus
Bacillus lentus
Bacillus licheniformis
Bacillus megaterium
Bacillus mycoides
Bacillus pantothenticus
Bacillus pumilus
Bacillus species
Bacillus sphaericus
Bacillus stearothermophilus
Bacillus subtilis
Bacillus thuringiensis
Bacteroides caccae
Bacteroides capillosus
Bacteroides distasonis
Bacteroides eggerthii
Bacteroides fragilis
Bacteroides merdae
Bacteroides ovatus
Bacteroides species
Bacteroides splanchnicus
Bacteroides stercoris
Bacteroides thetaiotaomicron
Bacteroides uniformis
Bacteroides ureolyticus (B. corrodens)
Bacteroides vulgatus
Bergeyella (Weeksella) zoohelcum
Bifidobacterium adolescentis
Bifidobacterium bifidum
Bifidobacterium breve
Bifidobacterium dentium
Bifidobacterium infantis
Bifidobacterium species
Blastoschizomyces (Dipodascus)
capitatus
Bordetella avium
Bordetella bronchiseptica
Bordetella parapertussis
Bordetella pertussis
Bordetella species
Borrelia species
Branhamella (Moraxella) catarrhalis
Branhamella species
Brevibacillus brevis
Brevibacillus laterosporus
Brevibacterium casei
Brevibacterium epidermidis
Brevibacterium linens
Brevibacterium species
Brevundimonas (Pseudomonas)
diminuta
Brevundimonas (Pseudomonas)
vesicularis
Brevundimonas species
Brochothrix thermosphacta
Brucella abortus
Brucella canis
Brucella melitensis
Brucella ovis
Brucella species
Brucella suis
Budvicia aquatica
Burkholderia (Pseudomonas) cepacia
Burkholderia (Pseudomonas) gladioli
Burkholderia (Pseudomonas) mallei
Burkholderia (Pseudomonas)
pseudomallei
Burkholderia species
Buttiauxella agrestis
Campylobacter coli
Campylobacter concisus
Campylobacter fetus
Campylobacter fetus subsp. fetus
Campylobacter fetus subsp.
venerealis
Campylobacter hyointestinalis
Campylobacter jejuni subsp. doylei
Campylobacter jejuni subsp. jejuni
Campylobacter lari
Campylobacter lari subsp. UPTC
Campylobacter mucosalis
Campylobacter species
Campylobacter sputorum
Campylobacter sputorum subsp.
bubulus
Campylobacter sputorum subsp.
fecalis
Campylobacter sputorum subsp.
sputorum
Campylobacter upsaliensis
Candida (Clavispora) lusitaniae
Candida (Pichia) guilliermondii
Candida (Torulopsis) glabrata
Candida albicans
Candida boidinii
Candida catenulata
Candida ciferrii
Candida colliculosa
Candida conglobata
Candida curvata (Cryptococcus
curvatus)
Candida dattila
Candida dubliniensis
Candida famata
Candida globosa
Candida hellenica
Candida holmii
Candida humicola
Candida inconspicua
Candida intermedia
Candida kefyr
Candida krusei
Candida lambica
Candida magnoliae
Candida maris
Candida melibiosica
Candida membranaefaciens
Candida norvegensis
Candida norvegica
Candida parapsilosis
Candida paratropicalis
Candida pelliculosa
Candida pseudotropicalis
Candida pulcherrima
Candida ravautii
Candida rugosa
Candida sake
Candida silvicola
Candida species
Candida sphaerica
Candida stellatoidea
Candida tenuis
Candida tropicalis
Candida utilis
Candida valida
Candida vini
Candida viswanathii
Candida zeylanoides
Capnocytophaga gingivalis
Capnocytophaga ochracea
Capnocytophaga species
Capnocytophaga sputigena
Cardiobacterium hominis
Camobacterium divergens
Camobacterium piscicola
CDC group ED-2
CDC group EF4 (Pasteurella sp.)
CDC group EF-4A
CDC group EF-4B
CDC group EQ-Z
CDC group HB-5
CDC group II K-2
CDC group IV C-2 (Bordetella-like)
CDC group M5
CDC group M6
Cedecea davisae
Cedecea lapagei
Cedecea neteri
Cedecea species
Cellulomonas (Oerskovia) turbata
Cellulomonas species
Chlamydia species
Chromobacterium violaceum
Chryseobacterium (Flavobacterium)
indologenes
Chryseobacterium (Flavobacterium)
meningosepticum
Chryseobacterium gleum
Chryseobacterium species
Chryseomonas indologenes
Citeromyces matritensis
Citrobacter amalonaticus
Citrobacter braakii
Citrobacter diversus
Citrobacter farmeri
Citrobacter freundii
Citrobacter freundii complex
Citrobacter koseri
Citrobacter sedlakii
Citrobacter species
Citrobacter werkmanii
Citrobacter youngae
Clostridium acetobutylicum
Clostridium barati
Clostridium beijerinckii
Clostridium bifermentans
Clostridium botulinum
Clostridium botulinum (NP) B&F
Clostridium botulinum (NP) E
Clostridium botulinum (P) A&H
Clostridium botulinum (P) F
Clostridium botulinum G1
Clostridium botulinum G2
Clostridium butyricum
Clostridium cadaveris
Clostridium chauvoei
Clostridium clostridiiforme
Clostridium difficile
Clostridium fallax
Clostridium glycolicum
Clostridium hastiforme
Clostridium histolyticum
Clostridium innocuum
Clostridium limosum
Clostridium novyi
Clostridium novyi A
Clostridium paraputrificum
Clostridium perfringens
Clostridium putrificum
Clostridium ramosum
Clostridium septicum
Clostridium sordellii
Clostridium species
Clostridium sphenoides
Clostridium sporogenes
Clostridium subterminale
Clostridium tertium
Clostridium tetani
Clostridium tyrobutyricum
Comamonas (Pseudomonas)
acidovorans
Comamonas (Pseudomonas)
testosteroni
Comamonas species
Corynebacterium accolens
Corynebacterium afermentans
Corynebacterium amycolatum
Corynebacterium aquaticum
Corynebacterium argentoratense
Corynebacterium auris
Corynebacterium bovis
Corynebacterium coyleae
Corynebacterium cystitidis
Corynebacterium diphtheriae
Corynebacterium diphtheriae biotype
belfanti
Corynebacterium diphtheriae biotype
gravis
Corynebacterium diphtheriae biotype
intermedius
Corynebacterium diphtheriae biotype
mitis
Corynebacterium flavescens
Corynebacterium glucuronolyticum
Corynebacterium glucuronolyticum-
seminale
Corynebacterium group A
Corynebacterium group A-4
Corynebacterium group A-5
Corynebacterium group ANF
Corynebacterium group B
Corynebacterium group B-3
Corynebacterium group F
Corynebacterium group F-1
Corynebacterium group F-2
Corynebacterium group G
Corynebacterium group G-1
Corynebacterium group G-2
Corynebacterium group I
Corynebacterium group I-2
Corynebacterium jeikeium (group JK)
Corynebacterium kutscheri (C. murium)
Corynebacterium macginleyi
Corynebacterium minutissimum
Corynebacterium pilosum
Corynebacterium propinquum
Corynebacterium
pseudodiphtheriticum
Corynebacterium pseudotuberculosis
Corynebacterium pyogenes
Corynebacterium renale
Corynebacterium renale group
Corynebacterium seminale
Corynebacterium species
Corynebacterium striatum (C. flavidum)
Corynebacterium ulcerans
Corynebacterium urealyticum (group
D2)
Corynebacterium xerosis
Cryptococcus albidus
Cryptococcus ater
Cryptococcus cereanus
Cryptococcus gastricus
Cryptococcus humicolus
Cryptococcus lactativorus
Cryptococcus laurentii
Cryptococcus luteolus
Cryptococcus melibiosum
Cryptococcus neoformans
Cryptococcus species
Cryptococcus terreus
Cryptococcus uniguttulatus
Debaryomyces hansenii
Debaryomyces marama
Debaryomyces polymorphus
Debaryomyces species
Dermabacter hominis
Dermacoccus (Micrococcus)
nishinomiyaensis
Dietzia species
Edwardsiella hoshinae
Edwardsiella ictaluri
Edwardsiella species
Edwardsiella tarda
Eikenella corrodens
Empedobacter brevis (Flavobacterium
breve)
Enterobacter aerogenes
Enterobacter agglomerans
Enterobacter amnigenus
Enterobacter amnigenus asburiae
(CDC enteric group 17)
Enterobacter amnigenus biogroup 1
Enterobacter amnigenus biogroup 2
Enterobacter asburiae
Enterobacter cancerogenus
Enterobacter cloacae
Enterobacter gergoviae
Enterobacter hormaechei
Enterobacter intermedius
Enterobacter sakazakii
Enterobacter species
Enterobacter taylorae
Enterobacter taylorae (CDC enteric
group 19)
Enterococcus (Streptococcus)
cecorum
Enterococcus (Streptococcus)
faecalis (Group D)
Enterococcus (Streptococcus)
faecium(Group D)
Enterococcus (Streptococcus)
saccharolyticus
Enterococcus avium (Group D)
Enterococcus casseliflavus
(Steptococcus faecium subsp.
casseliflavus)
Enterococcus durans (Streptococcus
faecium subsp. durans) (Group D)
Enterococcus gallinarum
Enterococcus hirae
Enterococcus malodoratus
Enterococcus mundtii
Enterococcus raffinosus
Enterococcus species
Erwinia amylovora
Erwinia carotovora
Erwinia carotovora subsp. atroseptica
Erwinia carotovora subsp.
betavasculorum
Erwinia carotovora subsp. carotovora
Erwinia chrysanthemi
Erwinia cypripedii
Erwinia mallotivora
Erwinia nigrifluens
Erwinia quercina
Erwinia rhapontici
Erwinia rubrifaciens
Erwinia salicis
Erwinia species
Erysipelothrix rhusiopathiae
Erysipelothrix species
Escherichia blattae
Escherichia coli
Escherichia coli A-D
Escherichia coli O157:H7
Escherichia fergusonii
Escherichia hermannii
Escherichia species
Escherichia vulneris
Eubacterium aerofaciens
Eubacterium alactolyticum
Eubacterium lentum
Eubacterium limosum
Eubacterium species
Ewingella americana
Filobasidiella neoformans
Filobasidium floriforme
Filobasidium uniguttulatum
Flavimonas oryzihabitans
Flavobacterium gleum
Flavobacterium indologenes
Flavobacterium odoratum
Flavobacterium species
Francisella novicida
Francisella philomiragia
Francisella species
Francisella tularensis
Fusobacterium mortiferum
Fusobacterium necrogenes
Fusobacterium necrophorum
Fusobacterium nucleatum
Fusobacterium species
Fusobacterium varium
Gaffkya species
Gardnerella vaginalis
Gemella haemolysans
Gemella morbillorum
Gemella species
Geotrichum candidum
Geotrichum fermentans
Geotrichum penicillarum
Geotrichum penicillatum
Geotrichum species
Gordona species
Haemophilus aegyptius
Haemophilus aphrophilus
Haemophilus ducreyi
Haemophilus haemoglobinophilus
Haemophilus haemolyticus
Haemophilus influenzae
Haemophilus influenzae biotype I
Haemophilus influenzae biotype II
Haemophilus influenzae biotype III
Haemophilus influenzae biotype IV
Haemophilus influenzae biotype V
Haemophilus influenzae biotype VI
Haemophilus influenzae biotype VII
Haemophilus influenzae biotype VIII
Haemophilus paragallinarum
Haemophilus parahaemolyticus
Haemophilus parainfluenzae
Haemophilus parainfluenzae biotype I
Haemophilus parainfluenzae biotype II
Haemophilus parainfluenzae biotype
III
Haemophilus parainfluenzae biotype
IV
Haemophilus parainfluenzae biotype V
Haemophilus parainfluenzae biotype
VI
Haemophilus parainfluenzae biotype
VII
Haemophilus parainfluenzae biotype
VIII
Haemophilus paraphrohaemolyticus
Haemophilus paraphrophilus
Haemophilus segnis
Haemophilus somnus
Haemophilus species
Hafnia alvei
Hanseniaspora guilliermondii
Hanseniaspora uvarum
Hanseniaspora valbyensis
Hansenula anomala
Hansenula holstii
Hansenula polymorpha
Helicobacter (Campylobacter) cinaedi
Helicobacter (Campylobacter)
fennelliae
Helicobacter (Campylobacter) pylori
Issatchenkia orientalis
Kingella denitrificans
Kingella indologenes
Kingella kingae
Kingella species
Klebsiella ornithinolytica
Klebsiella oxytoca
Klebsiella planticola
Klebsiella pneumoniae subsp.
ozaenae
Klebsiella pneumoniae subsp.
pneumoniae
Klebsiella pneumoniae subsp.
rhinoscleromatis
Klebsiella species
Klebsiella terrigena
Kloeckera apiculata
Kloeckera apis
Kloeckera japonica
Kloeckera species
Kluyvera ascorbata
Kluyvera cryocrescens
Kluyvera species
Kluyveromyces lactis
Kluyveromyces marxianus
Kluyveromyces thermotolerans
Kocuria (Micrococcus) kristinae
Kocuria (Micrococcus) rosea
Kocuria(Micrococcus) varians
Koserella trabulsii
Kytococcus (Micrococcus)
sedentarius
Lactobacillus (Weissella) viridescens
Lactobacillus A
Lactobacillus acidophilus
Lactobacillus B
Lactobacillus brevis
Lactobacillus buchneri
Lactobacillus casei
Lactobacillus casei subsp. casei
Lactobacillus casei subsp. lactosus
Lactobacillus casei subsp. rhamnosus
Lactobacillus catenaformis
Lactobacillus cellobiosus
Lactobacillus collinoides
Lactobacillus coprophilus
Lactobacillus crispatus
Lactobacillus curvatus
Lactobacillus delbrueckii subsp.
bulgaricus
Lactobacillus delbrueckii subsp.
delbrueckii
Lactobacillus delbrueckii subsp. lactis
Lactobacillus fermentum
Lactobacillus fructivorans
Lactobacillus helveticus
Lactobacillus helveticus subsp. jugurti
Lactobacillus jensenii
Lactobacillus lindneri
Lactobacillus minutus
Lactobacillus paracasei subsp.
paracasei
Lactobacillus pentosus
Lactobacillus plantarum
Lactobacillus salivarius
Lactobacillus salivarius var. salicinius
Lactobacillus species
Lactococcus diacitilactis
Lactococcus garvieae
Lactococcus lactis subsp. cremoris
Lactococcus lactis subsp. diacitilactis
Lactococcus lactis subsp. hordniae
Lactococcus lactis subsp. lactis
Lactococcus plantarum
Lactococcus raffinolactis
Leclercia adecarboxylata
Legionella species
Leminorella species
Leptospira species
Leptotrichia buccalis
Leuconostoc (Weissella)
paramesenteroides
Leuconostoc carnosum
Leuconostoc citreum
Leuconostoc gelidum
Leuconostoc lactis
Leuconostoc mesenteroides
Leuconostoc mesenteroides subsp.
cremoris
Leuconostoc mesenteroides subsp.
dextranicum
Leuconostoc mesenteroides subsp.
mesenteroides
Leuconostoc species
Listeria grayi
Listeria innocua
Listeria ivanovii
Listeria monocytogenes
Listeria murrayi
Listeria seeligeri
Listeria species
Listeria welshimeri
Megasphaera elsdenii
Methylobacterium mesophilicum
Metschnikowia pulcherrima
Microbacterium species
Micrococcus luteus
Micrococcus lylae
Micrococcus species
Mobiluncus curtisii
Mobiluncus mulieris
Mobiluncus species
Moellerella wisconsensis
Moraxella (Branhamella) catarrhalis
Moraxella atlantae
Moraxella bovis
Moraxella lacunata
Moraxella nonliquefaciens
Moraxella osloensis
Moraxella phenylpyruvica
Moraxella species
Morganella morganii
Morganella morganii subsp. morganii
Morganella morganii subsp. sibonii
Mycobacterium africanum
Mycobacterium asiaticum
Mycobacterium avium
Mycobacterium bovis
Mycobacterium chelonae
Mycobacterium fortuitum
Mycobacterium gordonae
Mycobacterium kansasii
Mycobacterium malmoense
Mycobacterium marinum
Mycobacterium phlei
Mycobacterium scrofulaceum
Mycobacterium smegmatis
Mycobacterium species
Mycobacterium tuberculosis
Mycobacterium ulcerans
Mycobacterium xenopi
Mycoplasma fermentans
Mycoplasma hominis
Mycoplasma orale
Mycoplasma pneumoniae
Mycoplasma species
Myroides species
Neisseria cinerea
Neisseria elongata subsp. elongata
Neisseria flava
Neisseria flavescens
Neisseria gonorrhoeae
Neisseria lactamica
Neisseria meningitidis
Neisseria mucosa
Neisseria perflava
Neisseria polysaccharea
Neisseria saprophytes
Neisseria sicca
Neisseria subflava
Neisseria weaveri
Neisseria weaveri (CDC group M5)
Nocardia species
Ochrobactrum anthropi
Oerskovia species
Oerskovia xanthineolytica
Oligella (Moraxella) urethralis
Oligella species
Oligella ureolytica
Paenibacillus alvei
Paenibacillus macerans
Paenibacillus polymyxa
Pantoea agglomerans
Pantoea ananas (Erwinia uredovora)
Pantoea dispersa
Pantoea species
Pantoea stewartii
Pasteurella (Haemophilus) avium
Pasteurella aerogenes
Pasteurella gallinarum
Pasteurella haemolytica
Pasteurella haemolyticus
Pasteurella multocida
Pasteurella multocida SF
Pasteurella multocida subsp.
multocida
Pasteurella multocida subsp. septica
Pasteurella pneumotropica
Pasteurella species
Pasteurella ureae
Pediococcus acidilactici
Pediococcus damnosus
Pediococcus pentosaceus
Pediococcus species
Peptococcus niger
Peptococcus species
Peptostreptococcus anaerobius
Peptostreptococcus asaccharolyticus
Peptostreptococcus indolicus
Peptostreptococcus magnus
Peptostreptococcus micros
Peptostreptococcus parvulus
Peptostreptococcus prevotii
Peptostreptococcus productus
Peptostreptococcus species
Peptostreptococcus tetradius
Phaecoccomyces exophialiae
Photobacterium damselae
Pichia (Hansenula) anomala
Pichia (Hansenula) jadinii
Pichia (Hansenula) petersonii
Pichia angusta (Hansenula
polymorpha)
Pichia carsonii (P. vini)
Pichia etchellsii
Pichia farinosa
Pichia fermentans
Pichia membranaefaciens
Pichia norvegensis
Pichia ohmeri
Pichia spartinae
Pichia species
Plesiomonas shigelloides
Porphyromonas asaccharolytica
Porphyromonas endodontalis
Porphyromonas gingivalis
Porphyromonas levii
Prevotella (Bacteroides) buccae
Prevotella (Bacteroides) buccalis
Prevotella (Bacteroides) corporis
Prevotella (Bacteroides) denticola
Prevotella (Bacteroides) loescheii
Prevotella (Bacteroides) oralis
Prevotella (Bacteroides) disiens
Prevotella (Bacteroides) oris
Prevotella bivia (Bacteroides bivius)
Prevotella intermedia (Bacteroides
intermedius)
Prevotella melaninogenica
(Bacteroides melaninogenicus)
Prevotella ruminicola
Propionibacterium acnes
Propionibacterium avidum
Propionibacterium granulosum
Propionibacterium propionicum
Propionibacterium species
Proteus mirabilis
Proteus penneri
Proteus species
Proteus vulgaris
Prototheca species
Prototheca wickerhamii
Prototheca zopfii
Providencia alcalifaciens
Providencia heimbachae
Providencia rettgeri
Providencia rustigianii
Providencia species
Providencia stuartii
Providencia stuartii urea +
Pseudomonas (Chryseomonas)
luteola
Pseudomonas acidovorans
Pseudomonas aeruginosa
Pseudomonas alcaligenes
Pseudomonas cepacia
Pseudomonas chlororaphis (P. aureofaciens)
Pseudomonas fluorescens
Pseudomonas fluorescens group
Pseudomonas mendocina
Pseudomonas pseudoalcaligenes
Pseudomonas putida
Pseudomonas species
Pseudomonas stutzeri
Pseudomonas testosteroni
Pseudomonas vesicularis
Pseudoramibacter (Eubacterium)
alactolyticus
Psychrobacter (Moraxella)
phenylpyruvicus
Rahnella aquatilis
Ralstonia (Pseudomonas,
Burkholderia) pickettii
Rhodococcus (Corynebacterium) equi
Rhodococcus species
Rhodosporidium toruloides
Rhodotorula glutinis
Rhodotorula minuta
Rhodotorula mucilaginosa (R. rubra)
Rhodotorula species
Rickettsia species
Rothia dentocariosa
Saccharomyces cerevisiae
Saccharomyces exiguus
Saccharomyces kluyverii
Saccharomyces species
Sakaguchia dacryoides
(Rhodosporidium dacryoidum)
Salmonella arizonae
Salmonella choleraesuis
Salmonella enteritidis
Salmonella gallinarum
Salmonella paratyphi A
Salmonella paratyphi B
Salmonella pullorum
Salmonella species
Salmonella typhi
Salmonella typhimurium
Salmonella typhisuis
Salmonella/Arizona
Serratia ficaria
Serratia fonticola
Serratia grimesii
Serratia liquefaciens
Serratia marcescens
Serratia odorifera
Serratia odorifera type 1
Serratia odorifera type 2
Serratia plymuthica
Serratia proteamaculans
Serratia proteamaculans subsp.
proteamaculans
Serratia proteamaculans subsp.
quinovora
Serratia rubidaea
Serratia species
Shewanella (Pseudomonas,
Alteromonas) putrefaciens
Shigella boydii
Shigella dysenteriae
Shigella flexneri
Shigella sonneri
Shigella species
Sphingobacterium multivorum
Sphingobacterium species
Sphingobacterium spiritivorum
Sphingobacterium thalpophilum
Sphingomonas (Pseudomonas)
paucimobilis
Sporidiobolus salmonicolor
Sporobolomyces roseus
Sporobolomyces salmonicolor
Sporobolomyces species
Staphylococcus (Peptococcus)
saccharolyticus
Staphylococcus arlettae
Staphylococcus aureus
Staphylococcus aureus (Coagulase-
negative)
Staphylococcus auricularis
Staphylococcus capitis
Staphylococcus capitis subsp. capitis
Staphylococcus capitis subsp.
ureolyticus
Staphylococcus caprae
Staphylococcus carnosus
Staphylococcus caseolyticus
Staphylococcus chromogenes
Staphylococcus cohnii
Staphylococcus cohnii subsp. cohnii
Staphylococcus cohnii subsp.
urealyticum
Staphylococcus epidermidis
Staphylococcus equorum
Staphylococcus gallinarum
Staphylococcus haemolyticus
Staphylococcus hominis
Staphylococcus hominis subsp.
hominis
Staphylococcus hominis subsp.
novobiosepticus
Staphylococcus hyicus
Staphylococcus intermedius
Staphylococcus kloosii
Staphylococcus lentus
Staphylococcus lugdunensis
Staphylococcus saprophyticus
Staphylococcus schleiferi
Staphylococcus sciuri
Staphylococcus simulans
Staphylococcus species
Staphylococcus warneri
Staphylococcus xylosus
Stenotrophomonas (Xanthomonas)
maltophilia
Stephanoascus ciferrii
Stomatococcus mucilaginosus
Streptococcus acidominimus
Streptococcus agalactiae
Streptococcus agalactiae (Group B)
Streptococcus agalactiae hemolytic
Streptococcus agalactiae non-
hemolytic
Streptococcus alactolyticus
Streptococcus anginosus
Streptococcus anginosus (Group D,
nonenterococci)
Streptococcus beta-hemolytic group A
Streptococcus beta-hemolytic non-
group A or B
Streptococcus beta-hemolytic non-
group A
Streptococcus beta-hemolytic
Streptococcus bovis (Group D,
nonenterococci)
Streptococcus bovis I
Streptococcus bovis II
Streptococcus canis
Streptococcus constellatus
Streptococcus constellatus
(Streptococcus milleri I)
Streptococcus constellatus (viridans
Streptococcus)
Streptococcus downei
Streptococcus dysgalactiae subsp.
dysgalactiae
Streptococcus dysgalactiae subsp.
equisimilis
Streptococcus equi (Group C/Group G
Streptococcus)
Streptococcus equi subsp. equi
Streptococcus equi subsp.
zooepidemicus
Streptococcus equinus
Streptococcus equinus (Group D,
nonenterococci)
Streptococcus equisimilis
Streptococcus equisimulis (Group
C/Group G Streptococcus)
Streptococcus Gamma (non)-
hemolytic
Streptococcus gordonii
Streptococcus Group B
Streptococcus Group C
Streptococcus Group D
Streptococcus Group E
Streptococcus Group F
Streptococcus Group G
Streptococcus Group L
Streptococcus Group P
Streptococcus Group U
Streptococcus intermedius
Streptococcus intermedius
(Streptococcus milleri II)
Streptococcus intermedius (viridans
Streptococcus)
Streptococcus milleri group
Streptococcus mitis
Streptococcus mitis (viridans
Streptococcus)
Streptococcus mitis group
Streptococcus mutans
Streptococcus mutans (viridans
Streptococcus)
Streptococcus oralis
Streptococcus parasanguis
Streptococcus pneumoniae
Streptococcus porcinus
Streptococcus pyogenes
Streptococcus pyogenes (Group A)
Streptococcus salivarius
Streptococcus salivarius (viridans
Streptococcus)
Streptococcus salivarius subsp.
salivarius
Streptococcus salivarius subsp.
thermophilus
Streptococcus sanguis
Streptococcus sanguis I (viridans
Streptococcus)
Streptococcus sanguis II
Streptococcus sanguis II (viridans
Streptococcus)
Streptococcus sobrinus
Streptococcus species
Streptococcus suis I
Streptococcus suis II
Streptococcus uberis
Streptococcus uberis (viridans
Streptococcus)
Streptococcus vestibularis
Streptococcus zooepidemicus
Streptococcus zooepidemicus (Group
C)
Streptomyces somaliensis
Streptomyces species
Suttonella (Kingella) indologenes
Tatumella ptyseos
Tetragenococcus (Pediococcus)
halophilus
Torulaspora delbrueckii
(Saccharomyces rosei)
Torulopsis candida
Torulopsis haemulonii
Torulopsis inconspicua
Treponema species
Trichosporon asahii
Trichosporon asteroides
Trichosporon beigelii
Trichosporon cutaneum
Trichosporon inkin
Trichosporon mucoides
Trichosporon ovoides
Trichosporon pullulans
Trichosporon species
Turicella otitidis
Ureaplasma species
Ureaplasma urealyticum
Veillonella parvula (V. alcalescens)
Veillonella species
Vibrio alginolyticus
Vibrio cholerae
Vibrio damsela
Vibrio fluvialis
Vibrio furnissii
Vibrio harveyi
Vibrio hollisae
Vibrio metschnikovii
Vibrio mimicus
Vibrio parahaemolyticus
Vibrio species
Vibrio species SF
Vibrio vulnificus
Weeksella (Bergeylla) virosa
Weeksella species
Weeksella virosa
Williopsis (Hansenula) satumus
Xanthomonas campestris
Xanthomonas species
Yarrowia (Candida) lipolytica
Yersinia aldovae
Yersinia enterocolitica
Yersinia enterocolitica group
Yersinia frederiksenii
Yersinia intermedia
Yersinia intermedius
Yersinia kristensenii
Yersinia pestis
Yersinia pseudotuberculosis
Yersinia pseudotuberculosis SF
Yersinia ruckeri
Yersinia species
Yokenella regensburgei
Yokenella regensburgei (Koserella
trabulsii)
Zygoascus hellenicus
Zygosaccharomyces species
¹The list includes microorganisms that may be identified by API identification test systems and VITEK ® automated identification system from bioMerieux Inc., or by the MicroScan ®-WalkAway ® automated systems from Dade Behring. Identification relies on classical identification methods using batteries of biochemical and other phenotypical tests.

TABLE 16
tuf gene sequences obtained in our laboratory (Example 42).

| | | | GenBank |
|---|---|---|---|
| Species | Strain no. | Gene | Accession no.* |
| Abiotrophia adiacens | ATCC49175 | tuf | AF124224 |
| Enterococcus avium | ATCC14025 | tufA | AF124220 |
| | | tufB | AF274715 |
| Enterococcus casseliflavus | ATCC25788 | tufA | AF274716 |
| | | tufB | AF274717 |
| Enterococcus cecorum | ATCC43198 | tuf | AF274718 |
| Enterococcus columbae | ATCC51263 | tuf | AF274719 |
| Enterococcus dispar | ATCC51266 | tufA | AF274720 |
| | | tufB | AF274721 |
| Enterococcus durans | ATCC19432 | tufA | AF274722 |
| | | tufB | AF274723 |
| Enterococcus faecalis | ATCC29212 | tuf | AF124221 |
| Enterococcus faecium | ATCC 19434 | tufA | AF124222 |
| | | tufB | AF274724 |
| Enterococcus gallinarum | ATCC49573 | tufA | AF124223 |
| | | tufB | AF274725 |
| Enterococcus hirae | ATCC8043 | tufA | AF274726 |
| | | tufB | AF274727 |
| Enterococcus malodoratus | ATCC43197 | tufA | AF274728 |
| | | tufB | AF274729 |
| Enterococcus mundtii | ATCC43186 | tufA | AF274730 |
| | | tufB | AF274731 |
| Enterococcus pseudoavium | ATCC49372 | tufA | AF274732 |
| | | tufB | AF274733 |
| Enterococcus raffinosus | ATCC49427 | tufA | AF274734 |
| | | tufB | AF274735 |
| Enterococcus saccharolyticus | ATCC43076 | tuf | AF274736 |
| Enterococcus solitarius | ATCC49428 | tuf | AF274737 |
| Enterococcus sulfureus | ATCC49903 | tuf | AF274738 |
| Lactococcus lactis | ATCC11154 | tuf | AF274745 |
| Listeria monocytogenes | ATCC15313 | tuf | AF274746 |
| Listeria seeligeri | ATCC35967 | tuf | AF274747 |
| Staphylococcus aureus | ATCC25923 | tuf | AF274739 |
| Staphylococcus epidermidis | ATCC14990 | tuf | AF274740 |
| Streptococcus mutans | ATCC25175 | tuf | AF274741 |
| Streptococcus pneumoniae | ATCC6303 | tuf | AF274742 |
| Streptococcus pyogenes | ATCC19615 | tuf | AF274743 |
| Streptococcus suis | ATCC43765 | tuf | AF274744 |

*Corresponding sequence ID NO. for the above ATCC strains are given in table 7.

TABLE 17
tuf gene sequences selected from databases for Example 42.

| Species | Gene | Accession no.* |
|---|---|---|
| Agrobacterium tumefaciens | tufA | X99673 |
| | tufB | X99674 |
| Anacystis nidulans | tuf | X17442 |
| Aquifex aeolicus | tufA | AE000657 |
| | tufB | AE000657 |
| Bacillus stearothermophilus | tuf | AJ000260 |
| Bacillus subtilis | tuf | AL009126 |
| Bacteroides fragilis | tuf | P33165 |
| Borrelia burgdorferi | tuf | AE000783 |
| Brevibacterium linens | tuf | X76863 |
| Bulkholderia cepacia | tuf | P33167 |
| Campylobacter jejuni | tufB | Y17167 |
| Chlamydia pneumoniae | tuf | AE001363 |
| Chlamydia trachomatis | tuf | M74221 |
| Corynebacterium glutamicum | tuf | X77034 |
| Cytophaga lytica | tuf | X77035 |
| Deinococcus radiodurans | tuf | AE000513 |
| Escherichia coli | tufA | J01690 |
| | tufB | J01717 |
| Fervidobacterium islandicum | tuf | Y15788 |
| Haemophilus influenzae | tufA | L42023 |
| | tufB | L42023 |
| Helicobacter pylori | tuf | AE000511 |
| Homo sapiens (Human) | EF-1α | X03558 |
| Methanococcus jannaschii | EF-1α | U67486 |
| Mycobacterium leprae | tuf | D13869 |
| Mycobacterium tuberculosis | tuf | X63539 |
| Mycoplasma genitalium | tuf | L43967 |
| Mycoplasma pneumoniae | tuf | U00089 |
| Neisseria gonorrhoeae | tufA | L36380 |
| Nicotiana tabacum (Tobacco) | EF-1α | U04632 |
| Peptococcus niger | tuf | X76869 |
| Planobispora rosea | tuf1 | U67308 |
| Saccharomyces cerevisiae (Yeast) | EF-1α | X00779 |
| Salmonella typhimurium | tufA | X55116 |
| | tufB | X55117 |
| Shewanella putrefaciens | tuf | P33169 |
| Spirochaeta aurantia | tuf | X76874 |
| Spirulina platensis | tufA | X15646 |
| Streptomyces aureofaciens | tuf1 | AF007125 |
| Streptomyces cinnamoneus | tuf1 | X98831 |
| Streptomyces coelicolor | tuf1 | X77039 |
| | tuf3 | X77040 |
| Streptomyces collinus | tuf1 | S79408 |
| Streptomyces ramocissimus | tuf1 | X67057 |
| | tuf2 | X67058 |
| | tuf3 | X67059 |
| Synechocystis sp. | tuf | AB001339 |
| Taxeobacter ocellatus | tuf | X77036 |
| Thermotoga maritima | tuf | AE000512 |
| Thermus aquaticus | tuf | X66322 |
| Thermus thermophilus | tuf | X06657 |
| Thiobacillus cuprinus | tuf | U78300 |
| Treponema pallidum | tuf | AE000520 |
| Wolinella succinogenes | tuf | X76872 |

*Sequence data were obtained from GenBank, EMBL, and SWISSPROT databases. Genes were designated as appeared in the references.

TABLE 18
Nucleotide and amino acid sequence identities of EF-Tu between different enterococci and other low G + C gram-positive bacteria.

[chemical structure]

[chemical structure]

The upper right triangle represents the deduced amino acid sequence identities of gram-positive bacterial EF-Tu; while the lower left triangle represents the DNA sequence identities of the corresponding tuf genes. The sequence identities between different enterococcaltufA genes are boxed while those between enterococcaltufB genes are shaded.

[chemical structure]

TABLE 19
Strains analyzed in Example 43.

| | | | 16S rDNA |
|---|---|---|---|
| | | | sequence |
| | | | accession |
| Taxon | Strain* | Strain† | number |
| Cedecea davisae | ATCC 33431^{T} | | |
| Cedecea lapagei | ATCC 33432^{T} | | |
| Cedecea neteri | ATCC 33855^{T} | | |
| Citrobacter amalonaticus | ATCC 25405^{T} | CDC 9020-77^{T} | AF025370 |
| Citrobacter braakii | ATCC 43162 | CDC 080-58^{T} | AF025368 |
| Citrobacter farmeri | ATCC 51112^{T} | CDC 2991-81^{T} | AF025371 |
| Citrobacter freundii | ATCC 8090^{T} | DSM 30039^{T} | AJ233408 |
| Citrobacter koseri | ATCC 27156^{T} | | |
| Citrobacter sedlakii | ATCC 51115^{T} | CDC 4696-86^{T} | AF025364 |
| Citrobacter werkmanii | ATCC 51114^{T} | CDC 0876-58^{T} | AF025373 |
| Citrobacter youngae | ATCC 29935^{T} | | |
| Edwardsiella hoshinae | ATCC 33379^{T} | | |
| Edwardsiella tarda | ATCC 15947^{T} | CDC 4411-68 | AF015259 |
| Enterobacter aerogenes | ATCC 13048^{T} | JCM 1235^{T} | AB004750 |
| Enterobacter agglomerans | ATCC 27989 | | |
| Enterobacter amnigenus | ATCC 33072^{T} | JCM 1237^{T} | AB004749 |
| Enterobacter asburiae | ATCC 35953^{T} | JCM 6051^{T} | AB004744 |
| Enterobacter cancerogenus | ATCC 35317^{T} | | |
| Enterobacter cloacae | ATCC 13047^{T} | | |
| Enterobacter gergoviae | ATCC 33028^{T} | JCM 1234^{T} | AB004748 |
| Enterobacter hormaechei | ATCC 49162^{T} | | |
| Enterobacter sakazakii | ATCC 29544^{T} | JCM 1233^{T} | AB004746 |
| Escherichia coli | ATCC 11775^{T} | ATCC 11775^{T} | X80725 |
| Escherichia coli | ATCC 25922 | ATCC 25922 | X80724 |
| Escherichia coli (ETEC) | ATCC 35401 | | |
| Escherichia coli (O157:H7) | ATCC 43895 | ATCC 43895 | Z83205 |
| Escherichia fergusonii | ATCC 35469^{T} | | |
| Escherichia hermanii | ATCC 33650^{T} | | |
| Escherichia vulneris | ATCC 33821^{T} | ATCC 33821^{T} | X80734 |
| Ewingella americana | ATCC 33852^{T} | NCPPB 3905 | X88848 |
| Hafnia alvei | ATCC 13337^{T} | ATCC 13337^{T} | M59155 |
| Klebsiella ornithinolytica | ATCC 31898 | CIP 103.364 | U78182 |
| Klebsiella oxytoca | ATCC 33496 | ATCC 13182^{T} | U78183 |
| Klebsiella planticola | ATCC 33531^{T} | JCM 7251^{T} | AB004755 |
| Klebsiella pneumoniae | | | |
| subsp. pneumoniae | ATCC 13883^{T} | DSM 30104^{T} | AJ233420 |
| subsp. ozaenae | ATCC 11296^{T} | ATCC 11296^{T} | Y17654 |
| subsp. rhinoscleromatis | ATCC 13884^{T} | | |
| Kluyvera ascorbata | ATCC 33433^{T} | ATCC 14236 | Y07650 |
| Kluyvera cryocrescens | ATCC 33435^{T} | | |
| Kluyvera georgiana | ATCC 51603^{T} | | |
| Leclercia adecarboxylata | ATCC 23216^{T} | | |
| Leminorella grimontii | ATCC 33999^{T} | DSM 5078^{T} | AJ233421 |
| Moellerella wisconsensis | ATCC 35017^{T} | | |
| Morganella morganii | ATCC 25830^{T} | | |
| Pantoea agglomerans | ATCC 27155^{T} | DSM 3493^{T} | AJ233423 |
| Pantoea dispersa | ATCC 14589^{T} | | |
| Plesiomonas shigelloides | ATCC 14029^{T} | | |
| Pragia fontium | ATCC 49100^{T} | DSM 5563^{T} | AJ233424 |
| Proteus mirabilis | ATCC 25933 | | |
| Proteus penneri | ATCC 33519^{T} | | |
| Proteus vulgaris | ATCC 13315^{T} | DSM 30118^{T} | AJ233425 |
| Providencia alcalifaciens | ATCC 9886^{T} | | |
| Providencia rettgeri | ATCC 9250 | | |
| Providencia rustigianii | ATCC 33673^{T} | | |
| Providencia stuartii | ATCC 33672 | | |
| Rahnella aquatilis | ATCC 33071^{T} | DSM 4594^{T} | AJ233426 |
| Salmonella choleraesuis | | | |
| subsp. arizonae | ATCC 13314^{T} | | |
| subsp. choleraesuis | | | |
| serotype Choleraesuis | ATCC 7001 | | |
| serotype Enteritidis‡ | ATCC 13076^{T} | SE22 | SE22 |
| serotype Gallinarum | ATCC 9184 | | |
| serotype Heidelberg | ATCC 8326 | | |
| serotype Paratyphi A | ATCC 9150 | | |
| serotype Paratyphi B | ATCC 8759 | | |
| serotype Typhi‡ | ATCC 10749 | St111 | U88545 |
| serotype Typhimurium‡ | ATCC 14028 | | |
| serotype Virchow | ATCC 51955 | | |
| subsp. diarizonae | ATCC 43973^{T} | | |
| subsp. houtenae | ATCC 43974^{T} | | |
| subsp. indica | ATCC 43976^{T} | | |
| subsp. salamae | ATCC 43972^{T} | | |
| Serratia fonticola | DSM 4576^{T} | DSM 4576^{T} | AJ233429 |
| Serratia grimesii | ATCC 14460^{T} | DSM 30063^{T} | AJ233430 |
| Serratia liquefaciens | ATCC 27592^{T} | | |
| Serratia marcescens | ATCC 13880^{T} | DSM 30121^{T} | AJ233431 |
| Serratia odorifera | ATCC 33077^{T} | DSM 4582^{T} | AJ233432 |
| Serratia plymuthica | DSM 4540^{T} | DSM 4540^{T} | AJ233433 |
| Serratia rubidaea | DSM 4480^{T} | DSM 4480^{T} | AJ233436 |
| Shigella boydii | ATCC 9207 | ATCC 9207 | X96965 |
| Shigella dysenteriae | ATCC 11835 | | |
| | | ATCC 13313^{T} | X96966 |
| | | ATCC 25931 | X96964 |
| Shigella flexneri | ATCC 12022 | ATCC 12022 | X96963 |
| Shigella sonnei | ATCC 29930^{T} | | |
| Tatumella ptyseos | ATCC 33301^{T} | DSM 5000^{T} | AJ233437 |
| Trabulsiella guamensis | ATCC 49490^{T} | | |
| Yersinia enterocolitica | ATCC 9610^{T} | ATCC 9610^{T} | M59292 |
| Yersinia frederiksenii | ATCC 33641^{T} | | |
| Yersinia intermedia | ATCC 29909^{T} | | |
| Yersinia pestis | RRB KIMD27 | ATCC 19428^{T} | X75274 |
| Yersinia pseudotuberculosis | ATCC 29833^{T} | | |
| Yersinia rohdei | ATCC 43380^{T} | ER-2935^{T} | X75276 |
| Shewanella putrefaciens | ATCC 8071^{T} | | |
| Vibrio cholerae | ATCC 25870 | ATCC 14035^{T} | X74695 |

T Type strain
*Strains used in this study for sequencing of partial tuf and atpD genes. SEQ ID NOs. for tuf and atpD sequences corresponding to the above reference strains are given in table 7.
†Strains used in other studies for sequencing of 16S rDNA gene. When both strain numbers are on the same row, both strains are considered to be the same although strain numbers may be different.
‡Phylogenetic serotypes considered species by the Bacteriological Code (1990 Revision).

TABLE 20
PCR primer pairs used in this study

| Primer | | Nucleotide | Amplicon |
|---|---|---|---|
| SEQ ID NO. | Sequence | positions* | length (bp) |
| Tuf | | | |
| 664 | 5′-AAYATGATIACIGGIGCIGCICARATGGA- | 271-299 | 884 |
| | 3′ | | |
| 697 | 5′-CCIACIGTICKICCRCCYTCRCG-3′ | 1132-1156 | |
| atpD | | | |
| 568 | 5′-RTIATIGGIGCIGTIRTIGAYGT-3′ | 25-47 | 884 |
| 567 | 5′-TCRTCIGCIGGIACRTAIAYIGCYTG-3′ | 883-908 | |
| 700 | 5′-TIRTIGAYGTCGARTTCCCTCARG-3′ | 38-61 | 871 |
| 567 | 5′-TCRTCIGCIGGIACRTAIAYIGCYTG-3′ | 883-908 | |

*The nucleotide positions given are for E. coli tuf and atpD sequences (GenBank accession no. AE000410 and V00267, respectively). Numbering starts from the first base of the initiation codon.

TABLE 21

Selection of M. catarrhalis-specific primer pairs from SEQ ID NO: 29¹
(466 pb DNA fragment) other than those previously tested².

| | | Amplicon | Moraxella | Moraxella | |
|---|---|---|---|---|---|
| | | size | catarrhalis | catarrhalis | Moraxella |
| Primer | Sequence | (bp) | ATCC 43628 | ATCC 53879 | nonliquefaciens |
| SEQ ID NO: 118 | CGCTGACGGCTTGTTTGTACCA | 118 | +³ | + | − |
| SEQ ID NO: 119 | TGTTTTGAGCTTTTTATTTTTTGA | | | | |
| VBmcat1 | TGCTTAAGATTCACTCTGCCATTTT | 93 | + | + | − |
| VBmcat2 | TAAGTCGCTGACGGCTTGTTT | | | | |
| VBmcat3 | CCTGCACCACAAGTCATCAT | 140 | + | + | − |
| VBmcat4 | AATTCACCAACAATGTCAAAGC | | | | |
| VBmcat5 | AATGATAACCAGTCAAGCAAGC | 219 | + | + | − |
| VBmcat6 | GGTGCATGGTGATTTGTAAAA | | | | |
| VBmcat7 | GTGTGCGTTCACTTTTACAAAT | 160 | + | + | − |
| VBmcat8 | GGTGTTAAGCTGATGATGAGAG | | | | |
| VBmcat9 | TGACCATGCACACCCTTATT | 167 | + | + | − |
| VBmcat10 | TCATTGGGATGAAAGTATCGTT | | | | |

| | Moraxella | Moraxella | Moraxella | Moraxella | Kingella | Kingella |
|---|---|---|---|---|---|---|
| Primer | lacunata | osloensis | atlantae | phenylpyruvica | indologenes | kingea |
| SEQ ID NO: 118 | − | − | − | − | − | − |
| SEQ ID NO: 119 | | | | | | |
| VBmcat1 | − | − | − | − | − | − |
| VBmcat2 | | | | | | |
| VBmcat3 | − | − | − | − | − | − |
| VBmcat4 | | | | | | |
| VBmcat5 | − | − | − | − | − | − |
| VBmcat6 | | | | | | |
| VBmcat7 | − | − | − | − | − | − |
| VBmcat8 | | | | | | |
| VBmcat9 | − | − | − | − | − | − |
| VBmcat10 | | | | | | |

| | Neisseria | Neisseria | Escherichia | Staphylococcus |
|---|---|---|---|---|
| Primer | meningitidis | gonorrhoeae | coli | aureus |
| SEQ ID NO: 118 | − | − | − | − |
| SEQ ID NO: 119 | | | | |
| VBmcat1 | − | − | − | − |
| VBmcat2 | | | | |
| VBmcat3 | − | − | − | − |
| VBmcat4 | | | | |
| VBmcat5 | − | − | − | − |
| VBmcat6 | | | | |
| VBmcat7 | − | − | − | − |
| VBmcat8 | | | | |
| VBmcat9 | − | − | − | − |
| VBmcat10 | | | | |

¹SEQ ID NO. from U.S. Pat. No. 6,001,564.
²All PCR assays were performed with 1 ng of purified genomic DNA by using an annealing temperature of 55° C. and 30 cycles of amplification. The genomic DNA from the various bacterial species above was always isolated from reference strains obtained from ATCC.
³All position results showed a strong amplification signal with genomic DNA from the target species M. catarrhalis.

TABLE 22

Selection of S. epidermidis-specific primer pairs from SEQ ID NO: 36¹
(705 pb DNA fragment) other than those previously tested.

| | | Amplicon | Staphylococcus | Staphylococcus | Staphylo- | Staphylo- |
|---|---|---|---|---|---|---|
| | | size | epidermidis, | epidermidis, | coccus | coccus |
| Primer | Sequence (all 25 nucleotides) | (bp) | ATCC 14990 | ATCC 12228 | capitis | cohnii |
| SEQ ID NO: 145 | ATCAAAAAGTTGGCGAACCTTTTCA | 125 | +³ | + | − | − |
| SEQ ID NO: 146 | CAAAAGAGCGTGGAGAAAAGTATCA | | | | | |
| VBsep3 | CATAGTCTGATTGCTCAAAGTCTTG | 208 | + | + | − | − |
| VBsep4 | GCGAATAGTGAACTACATTCTGTTG | | + | + | − | − |
| VBsep5 | CACGCTCTTTTGCAATTTCCATTGA | 208 | + | + | + | + |
| VBsep6 | GAAGCAAATATTCAAAATGCACCAG | | + | + | + | + |
| VBsep7 | AAAGTCTTTTGCTTCTTCAGATTCA | 177 | + | + | − | − |
| VBsep8 | GTGTTCACAGGTATGGATGCTCTTA | | + | + | NT | NT |
| | | | + | + | NT | NT |
| VBsep9 | GAGCATCCATACCTGTGAACACAGA | 153 | + | + | − | − |
| VBsep10 | TTTTCCAATTACAAGAGACATCAGT | | + | + | NT | NT |
| | | | + | + | NT | NT |
| VBsep11 | TTTGAATTCGCATGTACTTTGTTTG | 135 | + | + | − | − |
| VBsep12 | CCCCGGGTTCGAAATCGATAAAAAG | | | | | |

| | Staphylo- | Staphylo- | | Staphylo- | | | Staphylo- | Staphylo- | | Entero- |
|---|---|---|---|---|---|---|---|---|---|---|
| | coccus | coccus | Staphylo- | coccus | Staphylo- | Staphylo- | coccus | coccus | Bacillus | coccus |
| Primer | aureus | auricularis | coccus | hominis | coccus | coccus | simulans | warneri | subtilis | faecalis |
| SEQ ID NO: 145 | − | − | − | − | − | − | − | − | − | − |
| SEQ ID NO: 146 | | | | | | | | | | |
| VBsep3 | − | − | + | − | − | − | − | − | − | − |
| VBsep4 | − | − | − | − | − | − | − | − | − | − |
| VBsep5 | + | − | + | + | − | − | − | − | − | − |
| VBsep6 | + | − | + | + | − | − | − | NT | NT | NT |
| VBsep7 | − | − | + | − | − | − | + | − | − | − |
| VBsep8 | − | NT | − | NT | − | − | + | NT | NT | NT |
| | − | NT | − | NT | − | − | − | NT | NT | NT |
| VBsep9 | − | − | + | − | + | + | − | − | − | − |
| VBsep10 | − | NT | + | NT | + | − | − | NT | NT | NT |
| | − | NT | − | NT | − | − | − | NT | NT | NT |
| VBsep11 | − | − | − | − | − | − | − | − | − | − |
| VBsep12 | | | | | | | | | | |

| | Entero- | Entero- | | Strepto- | Strepto- | Strepto- | Annealing |
|---|---|---|---|---|---|---|---|
| | coccus | coccus | Listeria | coccus | coccus | coccus | temperature² |
| Primer | faecium | gallinarum | monocytogenes | agalactiae | pneumoniae | pyogenes | (° C.) |
| SEQ ID NO: 145 | − | − | − | − | − | − | 55 |
| SEQ ID NO: 146 | | | | | | | |
| VBsep3 | − | − | − | − | − | − | 55 |
| VBsep4 | − | − | − | − | − | − | 60 |
| VBsep5 | − | − | − | − | − | − | 55 |
| VBsep6 | NT | NT | NT | NT | NT | NT | 65 |
| VBsep7 | − | − | − | − | − | − | 55 |
| VBsep8 | NT | NT | NT | NT | NT | NT | 60 |
| | NT | NT | NT | NT | NT | NT | 65 |
| VBsep9 | − | − | − | − | − | − | 55 |
| VBsep10 | NT | NT | NT | NT | NT | NT | 60 |
| | NT | NT | NT | NT | NT | NT | 65 |
| VBsep11 | − | − | − | − | − | − | 55 |
| VBsep12 | | | | | | | |

¹SEQ ID NO. from U.S. Pat. No. 6,001,564.
²All PCR assays were performed with 1 ng of purified genomic DNA by using an annealing temperature of 55 to 65° C. and 30 cycles of amplification. The genomic DNA from the various bacterial species above was always isolated from reference strains obtained from ATCC.
³All positive results showed a strong amplification signal with genomic DNA from the target species S. epidermidis. The instensity of the positive amplification signal with species other than S. epidermidis was variable.
NT = NOT TESTED.

TABLE 23
Influence of nucleotide variation(s) on the efficiency of the PCR
amplification: Example with SEQ ID NO: 146 from S. epidermidis.

| | | | Staphyloccus | | | | |
|---|---|---|---|---|---|---|---|
| | | | epidermidis² | | | | Staphylococcus |
| | | | ATCC 14990 | | | | aureus³ |
| | Sequence | Number of | 50° C. | 55° C. | | | 50° C. |
| Primer¹ | (all 25 nucleotides) | mutation | 1 | 1 | 0.1 | 0.01 | 1 |
| SEQ ID NO: 145 | ATCAAAAAGTTGGCGAACCTTTTCA | 0 | | | | | |
| SEQ ID NO: 146 | CAAAAGAGCGTGGAGAAAAGTATCA | 0 | 3+⁴ | 3+ | 2+ | + | − |
| VBmut1 | CAAAAGAGCGTGGAGAAAAGTA [symbol] CA | 1 | 3+ | 3+ | 2+ | + | − |
| VBmut2 | CAAAAGAGCGTGGAGAAAA [symbol] TATCA | 1 | 3+ | 3+ | 2+ | + | − |
| VBmut3 | CAAAAGAGCGTGGAGA [symbol] AAGTATCA | 1 | 3+ | 3+ | 2+ | + | − |
| VBmut4 | CAAAAGAGCGTGG [symbol] GAAAAGTATCA | 1 | 3+ | 3+ | 2+ | + | − |
| VBmut5 | CAAAAGAGCG [symbol] GGAGAAAAGTATCA | 1 | 3+ | 3+ | 2+ | + | − |
| VBmut6 | CAAAAGA [symbol] CGTGGAGAAAAGTATCA | 1 | 3+ | 3+ | 2+ | + | − |
| VBmut7 | CAAA [symbol] GAGCGTGGAGAAAAGTATCA | 1 | 3+ | 3+ | 2+ | + | − |
| VBmut8 | C [symbol] AAAGAGCGTGGAGAAAAGTATCA | 1 | 3+ | 3+ | 2+ | + | − |
| VBmut9 | CAAAAGAGCGTGGAGA [symbol] AAGTA [symbol] CA | 2 | 3+ | 3+ | 2+ | + | − |
| VBmut10 | CAAAAGAGCG [symbol] GGAGA [symbol] AAGTATCA | 2 | 3+ | 3+ | 2+ | + | − |
| VBmut11 | CAAA [symbol] GAGCG [symbol] GGAGAAAAGTATCA | 2 | 3+ | 3+ | 2+ | + | − |
| VBmut12 | CAAA [symbol] GAGCGTGG [symbol] GAAAAGTA [symbol] CA | 3 | 3+ | 3+ | 2+ | + | − |
| VBmut13 | CAAA [symbol] GAGCG [symbol] GGAGA [symbol] AAGTA [symbol] CA | 4 | 3+ | 2+ | + | − | − |

¹All PCR tests were performed with SEQ ID NO: 145 without modification combined with SEQ ID NO: 146 or 13 modified versions of SEQ ID NO: 146. Boxed nucleotides indicate changes in SEQ ID NO: 146. All SEQ ID NOs. are from U.S. Pat No. 6,001,564.
²The tests with S. epidermidis were performed by using an annealing temperature of 55° C. with 1, 0.1 and 0.01 ng of purified genomic DNA or at 50° C. with 1 ng of purified genomic DNA.
³The tests with S. aureus were performed only at 50° C. with 1 ng of genomic DNA.
⁴The intensity of the positive amplification signal was quantified as follows: 3+ = strong signal, 2+ = intermediate signal and + = weak signal.

TABLE 24

Effect of the primer length on the efficiency of the PCR amplification¹: Example with
the AT-rich SEQ ID NO: 145² and SEQ ID NO: 146² from S. epidermidis.

| | | | | |
|---|---|---|---|---|
| Staphylococcus | | Staphylo- | | |
| epidermidis³ | Staphylo- | coccus | Staphylo- | Staphylo- |
| ATCC 14990 | coccus | haemo- | coccus | coccus |

| | | Length | 45° C. | | | 55° C. | | | aureus⁴ | | lyticus | | capitis | | warneri | |
|---|---|---|---|---|---|---|---|---|---|---|---|---|---|---|---|---|
| Primer | Sequence | (nt) | 1 | 0.1 | 0.01 | 1 | 0.1 | 0.01 | 45 | 55 | 45 | 55 | 45 | 55 | 45 | 55 |

| | | | | | | | | | | | | | | | | |
|---|---|---|---|---|---|---|---|---|---|---|---|---|---|---|---|---|
| VBsep301 | ATATCATCAAAAAGTTGGCGAACCTTTTCA | 30 | NT | NT | NT | 4+ | 3+ | 2+ | NT | − | NT | − | NT | − | NT | − |
| VBsep302 | AATTGCAAAAGAGCGTGGAGAAAAGTATCA | 30 | | | | | | | | | | | | | | |
| SEQ ID | ATCAAAAAGTTGGCGAACCTTTTCA | 25 | 4+⁵ | 3+ | 2+ | 4+ | 3+ | 2+ | − | − | − | − | + | − | − | − |
| NO: 145 | | | | | | | | | | | | | | | | |
| SEQ ID | CAAAAGAGCGTGGAGAAAAGTATCA | 25 | | | | | | | | | | | | | | |
| NO: 146 | | | | | | | | | | | | | | | | |
| VBsep201 | AAAGTTGGCGAACCTTTTCA | 20 | NT | NT | NT | 4+ | 3+ | 2+ | NT | − | NT | − | NT | − | NT | − |
| VBsep202 | GAGCGTGGAGAAAAGTATCA | 20 | | | | | | | | | | | | | | |
| VBsep171 | GTTGGCGAACCTTTTCA | 17 | 4+ | 3+ | 2+ | 3+ | 2+ | + | − | − | − | − | − | − | − | − |
| VBsep172 | CGTGGAGAAAAGTATCA | 17 | | | | | | | | | | | | | | |
| VBsep151 | TGGCGAACCTTTTCA | 15 | 3+ | 2+ | + | − | − | − | − | − | − | − | − | − | − | − |
| VBsep152 | TGGAGAAAAGTATCA | 15 | | | | | | | | | | | | | | |

¹All PCR tests were performed using an annealing temperature of 45 or 55° C. and 30 cycles of amplification.
²All SEQ ID NOs. in this Table are from U.S. pat. No. 6,001,546.
³The tests with S. epidermidis were made with 1, 0.1 and 0.01 ng of purified genomic DNA.
⁴The tests with all other bacterial species were made only with 1 ng of purified genomic DNA.
⁵The intensity of the positive amplification signal was quantified as follows: 4+ = very strong signal, 3+ = strong signal, 2+ = intermediate signal and + = weak signal.
NT = not tested.

TABLE 25

Effect of the primer length on the efficiency of the PCR amplification¹: Example with the
GC-rich SEQ ID NO: 83² and SEQ ID NO: 84² from P. aeruginosa.

| | | | |
|---|---|---|---|
| | Pseudomonas | | |
| | aeruginosa³ | | |
| Length | ATCC 35554 | Pseudomonas | Burkholderia |

| Primer | Sequence | (nt) | 1 | 0.1 | 0.01 | fluorescens⁴ | cepacia |
|---|---|---|---|---|---|---|---|
| SEQ ID NO 83 | CGAGCGGG | 19 | 2+⁵ | + | − | − | − |
| | TGGTGTTCATC | | | | | | |
| SEQ ID NO 84 | CAAGTCGT | 19 | | | | | |
| | CGTCGGAGGGA | | | | | | |
| Pse554-16a | CGAGCGGG | 16 | 2+ | + | − | − | − |
| | TGGTGTTC | | | | | | |
| Pse674-16a | GTCGTCGT | 16 | | | | | |
| | CGGAGGGA | | | | | | |
| Pse554-13b | GCGGGTGG | 13 | 2+ | + | − | − | − |
| | TGTTC | | | | | | |
| Pse674-13a | GTCGTCGG | 13 | | | | | |
| | AGGGA | | | | | | |

| | Shewanella | Stenotrophomonas | Neisseria | Haemophilus |
|---|---|---|---|---|
| Primer | putida | maltophilia | meningitidis | parahaemolyticus |
| SEQ ID NO 83 | − | − | − | − |
| SEQ ID NO 84 | | | | |
| Pse554-16a | − | − | − | − |
| Pse674-16a | | | | |
| Pse554-13b | − | − | − | − |
| Pse674-13a | | | | |

¹All PCR tests were performed using an annealing temperature of 55° C. and 30 cycles of amplification.
²All SEQ ID NOs. in this Table are from U.S. Pat. No. 6,001,546.
³The tests with P. aeruginosa were made with 1, 0.1 and 0.01 ng of purified genomic DNA.
⁴The tests with all other bacterial species were made only with 1 ng of purified genomic DNA.
⁵The intensity of the positive amplification signal was quantified as follows: 2+ = strong signal and + = moderately strong signal.

TABLE 26
Sequences used for the consensus of the vanA gene

| | GenBank | |
|---|---|---|
| Organism | access number | Source |
| E. faecium | M97297 | |
| E. faecium | AX111560 | Sequence 2293 of patent WO0123604 |
| E. faecium | AX085668 | Sequence 21 of patent WO0112803 |
| E. faecium | AX085648 | Sequence 1 of patent WO0112803 |
| E. faecium | AX110408 | Sequence 1141 of Patent WO0123604 |
| E. faecium | AX110406 | Sequence 1139 of patent WO0123604 |
| E. faecium | AX110320 | Sequence 1053 of patent WO0123604 |
| E. faecium | AX110319 | Sequence 1052 of patent WO0123604 |
| E. faecium | AX110318 | Sequence 1051 of patent WO0123604 |
| E. faecium | AX110316 | Sequence 1049 of patent WO0123604 |
| E. faecalis | AX110321 | Sequence 1054 of patent WO0123604 |
| E. gallinarum | AX110317 | Sequence 1050 of patent WO0123604 |
| E. gallinarum | AX110322 | Sequence 1055 of patent WO0123604 |
| E. flavescens | AX110324 | Sequence 1057 of patent WO0123604 |
| S. aureus | AE017171.1 | Direct deposit to NCBI |
| (VRSA) | | |

TABLE 27
Sequences used for the consensus of vanB gene

| Organism | GenBank access number | Source |
|---|---|---|
| E. faecium SLH475 | AF310954.1 | Tn5382 transposon ligase VanB2 (vanB2) gene |
| E. faecium UI709 | AY145441.1 | D-alanine:D-lactate ligase (vanB2) |
| E. faecium VRE-1 | AF310953.1 | Tn5382 ligase VanB2 (vanB2) gene |
| E. faecium | U94526.1 | vancomycin resistance protein B (vanB) gene, |
| E. faecium | AJ306727.1 | plasmid pVREM3123/00 partial vanHB gene and partial |
| | | vanB2 gene |
| E. faecium | AJ306726.1 | plasmid pVREM2497/00 partial vanHB gene and partial |
| | | vanB2 gene |
| E. faecium | Z83305.1 | vanB2, vanHB2 and vanXB2 genes |
| E. faecium | Z83305.1 | vanB2, vanHB2 and vanXB2 genes |
| E. faecium CG4248 | AF310957.1 | transposon Tn5382 ligase VanB2 (vanB2) gene, |
| E. faecalis | L15304.1 | vancomycin resistance vanB2 gene |
| E. faecalis | U35369.1 | vancomycin resistance genes, response regulator (vanRB), |
| | | protein histidine kinase (vanSB), D,D-carboxypeptidase |
| | | (vanYB), putative D-2-hydroxyacid dehydrogenase (vanHB), |
| | | D-Ala:D-Lac ligase (vanB), and putative D,D-dipeptidase |
| | | (vanXB) genes |
| E. faecalis | U00456.1 | vanB gene |
| E. faecalis | L06138.1 | VANB gene |
| E. faecalis | U72704.1 | vancomycin resistance protein (vanB) gene |
| E. faecalis T4059 | AF310955.1 | transposon Tn5382 ligase VanB2 (vanB2) gene |
| E. faecalis | L15304.1 | vancomycin resistance vanB2 gene |
| E. faecalis T4059 | AF310955.1 | transposon Tn5382 ligase VanB2 (vanB2) gene |
| E. faecalis | AF192329.1 | transposon Tn1549, complete sequence |
| S. bovis biotype II | Z70527.1 | partial vanB2 gene |
| S. lutetiensis strain 5-F9 | AY035703.1 | Tn5382-like transposon ligase VanB2 (vanB2) gene |

*Deposited directly to NCBI

TABLE 28
Number of positive assay results out of five in VanR Assay.

| DNA copies number | E. faecium | E. faecalis |
|---|---|---|
| 0.5 | 2 | 2 |
| 2.5 | 5 | 3 |
| 5 | 5 | 4 |
| 10 | 5 | 5 |
| 20 | 5 | 5 |

TABLE 29
First list of exemplary strains tested with VanR assay.

| | | ATCC or Ref. |
|---|---|---|
| No | Strains | number |
| 1 | Enterococcus casseliflavus | 25788 |
| 2 | Enterococcus cecorum | 43198 |
| 3 | Enterococcus columbae | 51263 |
| 4 | Enterococcus malodoratus | 43197 |
| 5 | Enterococcus mundtii | 43186 |
| 6 | Enterococcus pseudoavium | 49372 |
| 7 | Enterococcus raffinosus | 49427 |
| 8 | Enterococcus dispar | 51266 |
| 9 | Enterococcus durans | 19432 |
| 10 | Enterococcus faecalis | 19433 |
| 11 | Enterococcus faecalis | 29212 |
| 12 | Enterococcus faecalis | R830 |
| 13 | Enterococcus faecium | 19434 |
| 14 | Enterococcus faecium | N97-330 |
| 15 | Enterococcus flavescens | 49996 |
| 16 | Enterococcus gallinarum | 49573 |
| 17 | Enterococcus saccharolyticus | 43076 |
| 18 | Enterococcus sulfureus | 49903 |
| 19 | Enterococcus faecium (vanD) | CCRI-14889 |
| 20 | Enterococcus faecium (vanD) | CCRI-14889 |
| 21 | Enterococcus faecalis (vanE) | CCRI-1908 |
| 22 | Enterococcus faecalis (vanE) | CCRI-1908 |
| 23 | Enterococcus faecalis (vanG) | CCRI-12848 |
| 24 | Enterococcus faecalis (vanG) | CCRI-12848 |

TABLE 30
Second list of exemplary strains tested with VanR assay

| | | ATCC or Ref. |
|---|---|---|
| No | Strains | number |
| 1 | Acinetobacter twoffii | CDCF 3697 |
| 2 | Aeromonas hydrophila | 7966 |
| 3 | Bacteroides fragilis | 25285 |
| 4 | Bacillus cereus | 13472 |
| 5 | Bifidobacterium breve | 15700 |
| 6 | Candida albicans | 10231 |
| 7 | Clostridium difficile | 9689 |
| 8 | Clostridium perfringens | 13124 |
| 9 | Corynebacterium bovis | 7715 |
| 10 | Escherichia coli | 25922 |
| 11 | Escherichia coli | 23511 |
| 12 | Fusobacterium nucleatum | 10953 |
| 13 | Gardnerella vaginalis | 14019 |
| 14 | Klebsiella oxytoca | 33496 |
| 15 | Klebsiella pneumoniae | 13883 |
| 16 | Listeria monocytogenes | L 374 |
| 17 | Morganella morganii subsp. morganii | 25830 |
| 18 | Peptostreptococcus anaerobius | 27337 |
| 19 | Peptostreptococcus asaccharolyticus | LSPQ 2639 |
| 20 | Porphyromonas asaccharolytica | 25260 |
| 21 | Prevotella melaninogenica | 25845 |
| 22 | Propionibacterium acnes | 6919 |
| 23 | Staphylococcus epidermidis | 14990 |
| 24 | Stenotrophomonas maltophilia | 13637 |

TABLE 31
Third list of exemplary strains tested with VanR assay.

| | | ATCC or Ref. |
|---|---|---|
| No | Strains | number |
| 1 | Abiotrophia defectiva | 49176 |
| 2 | Acinetobacter baumannii | 19606 |
| 3 | Actinomyces pyogenes | 19411 |
| 4 | Citrobacter braakii | 43162 |
| 5 | Citrobacter koseri | 27028 |
| 6 | Corynebacterium genitalium | LSPQ 3583 |
| 7 | Enterobacter cloacae | 13047 |
| 8 | Hafnia alvei | 13337 |
| 9 | Homo sapiens | 2.16 |
| 10 | Lactobacillus acidophilus | 4356 |
| 11 | Lactobacillus gasseri | 33323 |
| 12 | Mobiluncus curtisii subsp. holmesii | 35242 |
| 13 | Neisseria gonorrhoeae | 35201 |
| 14 | Pantoea agglomerans | 27155 |
| 15 | Pseudomonas aeruginosa | 35554 |
| 16 | Salmonella enterica subsp. Arizonae | 13314 |
| 17 | Salmonella enterica subsp. Enterica | 7001 |
| 18 | Salmonella typhimurium | 14028 |
| 19 | Shigella flexneri | 12022 |
| 20 | Shigella sonnei | 29930 |
| 21 | Staphylococcus aureus | 43300 |
| 22 | Streptococcus anginosus | 33397 |
| 23 | Streptococcus bovis | 33317 |
| 24 | Vibrio cholerae | 25870 |
| 25 | Yersinia enterocolitica subs. enterolitica | 23715 |

TABLE 32
Vancomycin resistant strains tested with VanR assay at 10⁵ CFU/rx.

| | | | ATCC or Ref. |
|---|---|---|---|
| No | Strains | Resistance gene | number |
| 1-2 | Enterococcus casseliflavus | vanC2 | 25788 |
| | (10⁴ CFU/rx) | | |
| 3-4 | Enterococcus casseliflavus | vanC2 | 25788 |
| 5-6 | Enterococcus faecalis | vanG | CCRI-12849 |
| 7-8 | Enterococcus faecium | vanD | R832 |
| 9-10 | Enterococcus faecium | vanD2 | CCRI-15140 |
| 11-12 | Enterococcus faecium | vanD | CCRI-2062 |
| 13-14 | Enterococcus faecium | vanD | CCRI-8824 |
| 15-16 | Enterococcus gallinarum | vanC | CCRI-9133 |
| 17-18 | Enterococcus gallinarum | vanC | CCRI-9131 |
| 19-20 | Enterococcus gallinarum | vanA and vanC1 | CCRI-1561 |

TABLE 33
Composition of premix (PM)

| | CONCENTRATION IN | |
|---|---|---|
| | FRESHLY PREPARED MIX | |
| COMPONENT | (28.8 μL FINAL VOLUME) | |
| FastStart Taq DNA Polymerase | 0.060 | U/μL |
| MgCl₂ | 3.010 | mM |
| Tris | 100.333 | mM |
| KCl | 10.033 | mM |
| (NH₄)₂SO₄ | 5.017 | mM |
| dNTPs | 200.667 | μM |
| Primer vanA649 (SEQ ID NO: 1090) | 0.120 | μM |
| Primer vanA754 (SEQ ID NO: 1091) | 0.101 | μM |
| Primer vanB626 (SEQ ID NO: 2298) | 0.702 | μM |
| Primer vanB774 (SEQ ID NO: 1096) | 0.702 | μM |
| Probe VanA-B5c-A0 (SEQ ID NO: 2299) | 0.120 | μM |
| Probe Van8-850-F0 (SEW ID NO: 2300) | 0.351 | μM |
| Probe Sign-B4-B0 (SEQ ID NO: 2301) | 0.201 | μM |
| pERVd Internal control (SEQ ID NO: | 3.582 | copies/μL (usual) |
| 2302) | | |
| S. epidermidis DNA | 895.836 | copies/μL |
| BSA | 0.301 | mg/mL |

| | |
|---|---|
| Trehalose | 4.014% |

*These components were added following Table 21

TABLE 34
Composition of final mix (MM)

| | | Sign-B4 | VanA- | VanB-B50 | IC (SEQ | |
|---|---|---|---|---|---|---|
| | | (SEQ ID NO: | B5c (SEQ ID | (SEQ ID NO: | ID NO: | |
| | n | 2301) | NO: 2299) | 2300) | 2302) | Specimen |
| MM1-a | 10 | x | | | | DNA³ |
| MM1-b | 5 | x | | | x¹ | TE 1X |
| MM2-a | 10 | | X | | | DNA³ |
| MM2-b | 5 | | X | | x¹ | TE 1X |
| MM3-a | 10 | | | x | | DNA³ |
| MM3-b | 5 | | | X | x¹ | TE 1X |
| MM4-std | 15 | x | X | X | x² | DNA⁴/TE 1X |

¹At 100 times the usual concentration
²At usual concentration
³At 25/50 VanA/VanB DNA copies
⁴At 1 ng/rx VanA/VanB DNA copies

TABLE 35
Positive results obtained in indicated beacon channel

| | Sign-B4 | | VanB-B50 | |
|---|---|---|---|---|
| | (SEQ ID NO: | VanA-B5 (SEQ | (SEQ ID NO: | |
| | 2301) | ID NO: 2299)c | 2300) | |
| | TET | FAM | Texas Red | Target |
| MM1-a | 0/5 | — | — | Efm |
| | 0/5 | — | — | Efs |
| MM1-b | 5/5 | — | — | IC |
| MM2-a | — | 5/5 | — | Efm |
| | — | 0/5 | — | Efs |
| MM2-b | — | 0/5 | — | IC |
| MM3-a | — | — | 0/5 | Efm |
| | — | — | 5/5 | Efs |
| MM3-b | — | — | 0/5 | IC |
| MM4-std | 5/5 | 5/5 | 0/5 | Efm |
| | 5/5 | 0/5 | 5/5 | Efs |
| | 5/5 | 0/5 | 0/5 | IC |

TABLE 36
List of enterococcal strains from different locations around the world tested
with VanR assay (dilutions 10⁻³).

| No | Strains | Reference number | Location | vanA CT | vanB CT |
|---|---|---|---|---|---|
| 1 | Enterococcus faecalis | CCRI-1471 | Texas, USA | 29.91 | — |
| 2 | Enterococcus faecalis | CCRI-1528 | Quebec, CAN | 27.05 | — |
| 3 | Enterococcus faecalis | CCRI-9741 | USA | — | 31.05 |
| 4 | Enterococcus gallinarum | CCRI-1568 | Quebec, CAN | 28.60 | — |
| 5 | Enterococcus faecium | CCRI-9911 | Taiwan, China | — | 31.96 |
| 6 | Enterococcus faecalis | 725 | Israel | — | 31.55 |
| 7 | Enterococcus faecalis | 1435 | Brazil | 28.28 | — |
| 8 | Enterococcus faecium | 6169 | Italy | 31.63 | — |
| 9 | Enterococcus gallinarum | CCRI-9737 | Norway | — | 29.50 |
| 10 | Enterococcus faecalis | CCRI-9738 | Germany | — | 31.35 |
| 11 | Enterococcus faecium | CCRI-9740 | Germany | — | 29.41 |
| 12 | Enterococcus faecalis | 13024 | Germany | 27.49 | — |
| 13 | Enterococcus faecalis | CCRI-9739 | Germany | — | 31.00 |
| 14 | Enterococcus faecium | CCRI-9733 | USA | — | 31.93 |
| 15 | Enterococcus faecium | 1585 | Argentina | 29.00 | — |
| 16 | Enterococcus faecium | 715 | Sweden | — | 30.87 |
| 17 | Enterococcus faecalis | CCRI-9954 | Netherlands | — | 31.83 |
| 18 | Enterococcus faecium | CCRI-1482 | Toronto, CAN | 29.40 | — |

*All strains gave vanA or vanB positive PCR results.

TABLE 37
List of resistant non enterococcal strains (vanB genotype) tested
with VanR assay.

| | | Reference | Texas Red CT |
|---|---|---|---|
| No | Strains | number | (cycles) |
| 1 | Clostridium innocuum | CCRI-9927 | 29.6 |
| 2 | Clostridium sp. | IDI-1987 | 31.9 |
| 3 | Clostridium sp. | CCRI-9929 | 32.5 |
| 4 | Clostridium symbosium | CCRI-9928 | 31.6 |
| 5 | Eggerthella lenta | CCRI-9926 | 32.4 |

*All strains gave vanB positive PCR results.

TABLE 38
VanR Assay Formulation

| | Concentration of | | Concentration of | |
|---|---|---|---|---|
| | components at | | components at | |
| | final volume (28 μL) | | final volume (28.8 μL) | |
| Raw Material | Lyophilized | | Fresh | |
| FastStart Taq DNA Polymerase | 0..060 | U/μL¹ | 0.060 | U/μL¹ |
| MgCl₂ | 3.000 | mM² | 3.010 | mM² |
| Tris | 100.000 | mM (pH 8.3)² | 100.333 | mM (pH 8.3)² |
| KCl | 10.000 | mM² | 10.033 | mM² |
| (NH₄)₂S0₄ | 5.000 | mM² | 5.017 | mM² |
| dNTP | 200.000 | μM | 200.667 | μM |
| Primer VanA 649 (SEQ ID NO: 1090) | 0.120 | μM | 0.120 | μM |
| Primer Van A 754 (SEQ ID NO: 1091) | 0.100 | μM | 0.101 | μM |
| Primer Van B 626 (SEQ ID NO: 2298) | 0.700 | μM | 0.702 | μM |
| Primer van B 774 (SEQ ID NO: 1096) | 0.700 | μM | 0.702 | μM |
| Probe VanA-B5c-A0 (SEQ ID NO: 2299) | 0.120 | μM | 0.120 | μM |
| Probe VanB-B50-F0 (SEQ ID NO: 2300) | 0.350 | μM | 0.351 | μM |
| Probe Sign-B4-B0 (SEQ ID NO: 2301) | 0.200 | μM | 0.201 | μM |
| Internal control pERVd (SEQ ID NO: 2302) | 3.570 | copies/μL | 3.582 | copies/μL |
| S. epidermidis DNA | 892.857 | copies/μL³ | 895.836 | copies/μL³ |
| BSA | 0.300 | mg/mL | 0.301 | mg/mL |

| | | |
|---|---|---|
| Trehalose | 4.000% | 4.014% |

Annex I: Specific and ubiquitous primers for nucleic acid
amplification (tuf sequences).

Originating DNA fragment

| | | | |
|---|---|---|---|
| | | SEQ ID | Nucleotide |
| SEQ ID NO. | Nucleotide sequence | NO. | position |

Bacterial species: Acinetobacter baumannii

| | | | |
|---|---|---|---|
| 1692 | 5′-GGT GAG AAC TGT GGT ATC TTA CTT | 1 | 478-501 |
| 1693^{a} | 5′-CAT TTC AAC GCC TTC TTT CAA CTG | 1 | 691-714 |

Bacterial species: Chlamydia pneumoniae

| | | | |
|---|---|---|---|
| 630 | 5′-CGG AGC TAT CCT AGT CGT TTC A | 20 | 2-23 |
| 629^{a} | 5′-AAG TTC CAT CTC AAC AAG GTC AAT A | 20 | 146-170 |
| 2085 | 5′-CAA ACT AAA GAA CAT ATC TTG CTA | 20 | 45-68 |
| 2086^{a} | 5′-ATA TAA TTT GCA TCA CCT TCA AG | 20 | 237-259 |
| 2087 | 5′-TCA GCT CGT GGG ATT AGG AGA G | 20 | 431-452 |
| 2088^{a} | 5′-AGG CTT CAC GCT GTT AGG CTG A | 20 | 584-605 |

Bacterial species: Chlamydia trachomatis

| | | | |
|---|---|---|---|
| 554 | 5′-GTT CCT TAC ATC GTT GTT TTT CTC | 22 | 82-105 |
| 555^{a} | 5′-TCT CGA ACT TTC TCT ATG TAT GCA | 22 | 249-272 |

Parasitical species: Cryptosporidium parvum

| | | | |
|---|---|---|---|
| 798 | 5′-TGG TTG TCC CAG CCG ATC GTT T | 865 | 158-179 |
| 804^{a} | 5′-CCT GGG ACG GCC TCT GGC AT | 865 | 664-683 |
| 799 | 5′-ACC TGT GAA TAC AAG CAA TCT | 865 | 280-300 |
| 805^{a} | 5′-CTC TTG TCC ATC TTA GCA GT | 865 | 895-914 |
| 800 | 5′-GAT GAA ATC TTC AAC GAA GTT GAT | 865 | 307-330 |
| 806^{a} | 5′-AGC ATC ACC AGA CTT GAT AAG | 865 | 946-966 |
| 801 | 5′-ACA ACA CCG AGA AGA TCC CA | 865 | 353-372 |
| 803^{a} | 5′-ACT TCA GTG GTA ACA CCA GC | 865 | 616-635 |
| 802 | 5′-TTG CCA TTT CTG GTT TCG TT | 865 | 377-396 |
| 807^{a} | 5′-AAA GTG GCT TCA AAG GTT GC | 865 | 981-1000 |

Bacterial species: Enterococcus faecium

| | | | |
|---|---|---|---|
| 1696 | 5′-ATG TTC CTG TAG TTG CTG GA | 64 | 189-208 |
| 1697^{a} | 5′-TTT CTT CAG CAA TAC CAA CAA C | 64 | 422-443 |

Bacterial species: Klebsiella pneumoniae

| | | | |
|---|---|---|---|
| 1329 | 5′-TGT AGA GCG CGG TAT CAT CAA AGT A | 103 | 352-377 |
| 1330^{a} | 5′-AGA TTC GAA CTT GGT GTG CGG G | 103 | 559-571 |

^{a}These sequences are from the complementary DNA strand of the sequence of the
originating fragment given in the Sequence Listing.

Originating DNA fragment

| | | | |
|---|---|---|---|
| | | SEQ ID | Nucleotide |
| SEQ ID NO. | Nucleotide sequence | NO. | position |

Bacterial species: Mycoplasma pneumoniae

| | | | |
|---|---|---|---|
| 2093 | 5′-TGT TGG CAA TCG AAG ACA CC | 2097^{a} | 635-654 |
| 2094^{b} | 5′-TTC AAT TTC TTG ACC TAC TTT CAA | 2097^{a} | 709-732 |

Bacterial species: Neisseria gonorrhoeae

| | | | |
|---|---|---|---|
| 551 | 5′-GAA GAA AAA ATC TTC GAA CTG GCT A | 126 | 256-280 |
| 552^{b} | 5′-TAC ACG GCC GGT GAC TAC G | 126 | 378-396 |
| 2173 | 5′-AAG AAA AAA TCT TCG AAC TGG CTA | 126 | 257-280 |
| 2174^{b} | 5′-TCT ACA CGG CCG GTG | 126 | 384-398 |
| 2175 | 5′-CCG CCA TAC CCC GTT T | 126 | 654-669 |
| 2176^{b} | 5′-CGG CAT TAC CAT TTC CAC ACC TTT | 126 | 736-759 |

Bacterial species: Pseudomonas aeruginosa

| | | | |
|---|---|---|---|
| 1694 | 5′-AAG GCA AGG ATG ACA ACG GC | 153 | 231-250 |
| 1695^{b} | 5′-ACG ATT TCC ACT TCT TCC TGG | 153 | 418-438 |

Bacterial species: Streptococcus agalactiae

| | | | |
|---|---|---|---|
| 549 | 5′-GAA CGT GAT ACT GAC AAA CCT TTA | 207-210^{c} | 308-331^{d} |
| 550^{b} | 5′-GAA GAA GAA CAC CAA CGT TG | 207-210^{c} | 520-539^{d} |

Bacterial species: Streptococcus pyogenes

| | | | |
|---|---|---|---|
| 999 | 5′-TTG ACC TTG TTG ATG ACG AAG AG | 1002 | 143-165 |
| 1000^{b} | 5′-TTA GTG TGT GGG TTG ATT GAA CT | 1002 | 622-644 |
| 1001 | 5′-AAG AGT TGC TTG AAT TAG TTG AG | 1002 | 161-183 |
| 1000^{b} | 5′-TTA GTG TGT GGG TTG ATT GAA CT | 1002 | 622-644 |

Parasitical species: Trypanosoma brucei

| | | | |
|---|---|---|---|
| 820 | 5′-GAA GGA GGT GTC TGC TTA CAC | 864 | 513-533 |
| 821^{b} | 5′-GGC GCA AAC GTC ACC ACA TCA | 864 | 789-809 |
| 820 | 5′-GAA GGA GGT GTC TGC TTA CAC | 864 | 513-533 |
| 822^{b} | 5′-CGG CGG ATG TCC TTA ACA GAA | 864 | 909-929 |

^{a}Sequence from databases.
^{b}These sequences are from the complementary DNA strand of the sequence of the
originating fragment given in the Sequence Listing.
^{c}These sequences were aligned to derive the corresponding primer.
^{d}The nucleotide positions refer to the S. agalactiae tuf sequence fragment
(SEQ ID NO. 209).

Originating DNA fragment

| | | | |
|---|---|---|---|
| | | SEQ ID | Nucleotide |
| SEQ ID NO. | Nucleotide sequence | NO. | position |

Parasitical species: Trypanosoma cruzi

| | | | |
|---|---|---|---|
| 794 | 5′-GAC GAC AAG TCG GTG AAC TT | 840-842^{a} | 281-300^{c} |
| 795^{b} | 5′-ACT TGC ACG CGA TGT GGC AG | 840-842^{a} | 874-893^{c} |

Bacterial genus: Clostridium sp.

| | | | |
|---|---|---|---|
| 796 | 5′-GGT CCA ATG CCW CAA ACW AGA | 32,719-724, | 32-52^{d} |
| | | 736^{a} | |
| 797^{b} | 5′-CAT TAA GAA TGG YTT ATC TGT SKC TCT | 32, 719-724, | 320-346^{d} |
| | | 736^{a} | |
| 808 | 5′-GCI TTA IWR GCA TTA GAA RAY CCA | 32, 719-724, | 224-247^{d} |
| | | 736^{a} | |
| 809^{b} | 5′-TCT TCC TGT WGC AAC TGT TCC TCT | 32, 719-724, | 337-360^{d} |
| | | 736^{a} | |
| 810 | 5′-AGA GMW ACA GAT AAR SCA TTC TTA | 32, 719-724, | 320-343^{d} |
| | | 736^{a} | |
| 811^{b} | 5′-TRA ART AGA ATT GTG GTC TRT ATC C | 32, 719-724, | 686-710^{d} |
| | | 736^{a} | |

Bacterial genus: Corynebacterium sp.

| | | | |
|---|---|---|---|
| 545 | 5′-TAC ATC CTB GTY GCI CTI AAC AAG TG | 34-44, 662^{a} | 89-114^{e} |
| 546^{b} | 5′-CCR CGI CCG GTR ATG GTG AAG AT | 34-44, 662^{a} | 350-372^{e} |

Bacterial genus: Enterococcus sp.

| | | | |
|---|---|---|---|
| 656 | 5′-AAT TAA TGG CTG CAG TTG AYG A | 58-72^{a} | 273-294^{f} |
| 657^{b} | 5′-TTG TCC ACG TTC GAT RTC TTC A | 58-72^{a} | 556-577^{f} |
| 656 | 5′-AAT TAA TGG CTG CAG TTG AYG A | 58-72^{a} | 273-294^{f} |
| 271^{b} | 5′-TTG TCC ACG TTG GAT RTC TTC A | 58-72^{a} | 556-577^{f} |
| 1137 | 5′-AAT TAA TGG CTG CWG TTG AYG AA | 58-72^{a} | 273-295^{f} |
| 1136^{b} | 5′-ACT TGT CCA CGT TSG ATR TCT | 58-72^{a} | 559-579^{f} |

^{a}These sequences were aligned to derive the corresponding primer.
^{b}These sequences are from the complementary DNA strand of the sequence of the
originating fragment given in the Sequence Listing.
^{c} The nucleotide positions refer to the T. cruzi tuf sequence fragment (SEQ ID
NO. 842).
^{d} The nucleotide positions refer to the C. perfringens tuf sequence fragment
(SEQ ID NO. 32).
^{e} The nucleotide positions refer to the C. diphtheriae tuf sequence fragment
(SEQ ID NO. 662).
^{f} The nucleotide positions refer to the E. durans tuf sequence fragment (SEQ ID
NO. 61).

Originating DNA fragment

| | | | |
|---|---|---|---|
| | | SEQ ID | Nucleotide |
| SEQ ID NO. | Nucleotide sequence | NO. | position |

Bacterial genus: Legionella sp.

| | | | |
|---|---|---|---|
| 2081 | 5′-GRA TYR TYA AAG TTG GTG AGG AAG | 111-112^{a} | 411-434^{b} |
| 2082^{c} | 5′-CMA CTT CAT CYC GCT TCG TAC C | 111-112^{a} | 548-569^{b} |

Bacterial genus: Staphylococcus sp.

| | | | |
|---|---|---|---|
| 553 | 5′-GGC CGT GTT GAA CGT GGT CAA ATC A | 176-203^{a} | 313-337^{d} |
| 575^{c} | 5′-TIA CCA TTT CAG TAC CTT CTG GTA A | 176-203^{a} | 653-677^{d} |
| 553 | 5′-GGC CGT GTT GAA CGT GGT CAA ATC A | 176-203^{a} | 313-337^{d} |
| 707^{c} | 5′-TWA CCA TTT CAG TAC CTT CTG GTA A | 176-203^{a} | 653-677^{d} |

Bacterial genus: Streptococcus sp.

| | | | |
|---|---|---|---|
| 547 | 5′-GTA CAG TTG CTT CAG GAC GTA TC | 206-231^{a} | 372-394^{e} |
| 548^{c} | 5′-ACG TTC GAT TTC ATC ACG TTG | 206-231^{a} | 548-568^{e} |

Fungal genus: Candida sp.

| | | | |
|---|---|---|---|
| 576 | 5′-AAC TTC RTC AAG AAG GTY GGT TAC AA | 407-426, | 332-357^{f} |
| | | 428-432^{a} | |
| 632^{c} | 5′-CCC TTT GGT GGR TCS TKC TTG GA | 407-426, | 791-813^{f} |
| | | 428-432^{a} | |
| 631 | 5′-CAG ACC AAC YGA IAA RCC ATT RAG AT | 407-426, | 523-548^{f} |
| | | 428-432^{a} | |
| 632^{c} | 5′-CCC TTT GGT GGR TCS TKC TTG GA | 407-426, | 791-813^{f} |
| | | 428-432^{a} | |
| 633 | 5′-CAG ACC AAC YGA IAA RCC ITT RAG AT | 407-426, | 523-548^{f} |
| | | 428-432^{a} | |
| 632^{c} | 5′-CCC TTT GGT GGR TCS TKC TTG GA | 407-426, | 791-813^{f} |
| | | 428-432^{a} | |

^{a}These sequences were aligned to derive the corresponding primer.
^{b}The nucleotide positions refer to the L. pneumophila tuf sequence fragment
(SEQ ID NO. 112).
^{c}These sequences are from the complementary DNA strand of the sequence of the
originating fragment given in the Sequence Listing.
^{d}The nucleotide positions refer to the S. aureus tuf sequence fragment (SEQ ID
NO. 179).
^{e}The nucleotide positions refer to the S. agalactiae tuf sequence fragment
(SEQ ID NO. 209).
^{f}The nucleotide positions refer to the C. albicans tuf(EF-1) sequence fragment
(SEQ ID NO. 408).

Originating DNA fragment

| | | | |
|---|---|---|---|
| | | SEQ ID | Nucleotide |
| SEQ ID NO. | Nucleotide sequence | NO. | position |

Fungal genus: Cryptococcus sp.

| | | | |
|---|---|---|---|
| 1971 | 5′-CYG ACT GYG CCA TCC TYA TCA | 434, 623, 1281, | 150-170^{b} |
| | | 1985, 1986^{a} | |
| 1973^{c} | 5′-RAC ACC RGI YTT GGW ITC CTT | 434, 623, 1281, | 464-484^{b} |
| | | 1985, 1986^{a} | |
| 1972 | 5′-MGI CAG CTC ATY ITT GCW KSC | 434, 623, 1281, | 260-280^{b} |
| | | 1985, 1986^{a} | |
| 1973^{c} | 5′-RAC ACC RGI YTT GGW ITC CTT | 434, 623, 1281, | 464-484^{b} |
| | | 1985, 1986^{a} | |

Parasitical genus: Entamoeba sp.

| | | | |
|---|---|---|---|
| 703 | 5′-TAT GGA AAT TCG AAA CAT CT | 512 | 38-57 |
| 704^{c} | 5′-AGT GCT CCA ATT AAT GTT GG | 512 | 442-461 |
| 703 | 5′-TAT GGA AAT TCG AAA CAT CT | 512 | 38-57 |
| 705^{c} | 5′-GTA CAG TTC CAA TAC CTG AA | 512 | 534-553 |
| 703 | 5′-TAT GGA AAT TCG AAA CAT CT | 512 | 38-57 |
| 706^{c} | 5′-TGA AAT CTT CAC ATC CAA CA | 512 | 768-787 |
| 793 | 5′-TTA TTG TTG CTG CTG GTA CT | 512 | 149-168 |
| 704^{c} | 5′-AGT GCT CCA ATT AAT GTT GG | 512 | 442-461 |

Parasitical genus: Giardia sp.

| | | | |
|---|---|---|---|
| 816 | 5′-GCT ACG ACG AGA TCA AGG GC | 513 | 305-324 |
| 819^{c} | 5′-TCG AGC TTC TGG AGG AAG AG | 513 | 895-914 |
| 817 | 5′-TGG AAG AAG GCC GAG GAG TT | 513 | 355-374 |
| 818^{c} | 5′-AGC CGG GCT GGA TCT TCT TC | 513 | 825-844 |

Parasitical genus: Leishmania sp.

| | | | |
|---|---|---|---|
| 701 | 5′-GTG TTC ACG ATC ATC GAT GCG | 514-526^{a} | 94-114^{d} |
| 702^{c} | 5′-CTC TCG ATA TCC GCG AAG CG | 514-526^{a} | 913-932^{d} |

^{a}These sequences were aligned to derive the corresponding primer.
^{b}The nucleotide positions refer to the C. neoformans tuf (EF-1) sequence
fragment (SEQ ID NO. 623).
^{c}These sequences are from the complementary DNA strand of the sequence of the
originating fragment given in the Sequence Listing.
^{d}The nucleotide positions refer to the L. tropica tuf(EF-1) sequence fragment
(SEQ ID NO. 526).

Originating DNA fragment

| | | | |
|---|---|---|---|
| | | SEQ ID | Nucleotide |
| SEQ ID NO. | Nucleotide sequence | NO. | position |

Parasitical genus: Trypanosoma sp.

| | | | |
|---|---|---|---|
| 823 | 5′-GAG CGG TAT GAY GAG ATT GT | 529, 840-842, | 493-512^{b} |
| | | 864^{a} | |
| 824^{c} | 5′-GGC TTC TGC GGC ACC ATG CG | 529, 840-842, | 1171-1190^{b} |
| | | 864^{a} | |

Bacterial family: Enterobacteriaceae

| | | | |
|---|---|---|---|
| 933 | 5′-CAT CAT CGT ITT CMT GAA CAA RTG | 78, 103, 146, | 390-413^{d} |
| | | 168, 238, 698^{a} | |
| 934^{c} | 5′-TCA CGY TTR RTA CCA CGC AGI AGA | 78, 103, 146, | 831-854^{d} |
| | | 168, 238, 698^{a} | |

Bacterial family: Mycobacteriaceae

| | | | |
|---|---|---|---|
| 539 | 5′-CCI TAC ATC CTB GTY GCI CTI AAC AAG | 122 | 85-111 |
| 540^{c} | 5′-GGD GCI TCY TCR TCG WAI TCC TG | 122 | 181-203 |

Bacterial group: Escherichia coli and Shigella

| | | | |
|---|---|---|---|
| 1661 | 5′-TGG GAA GCG AAA ATC CTG | 1668^{e} | 283-300 |
| 1665^{c} | 5′-CAG TAC AGG TAG ACT TCT G | 1668^{e} | 484-502 |

Bacterial group: Pseudomonads group

| | | | |
|---|---|---|---|
| 541 | 5′-GTK GAA ATG TTC CGC AAG CTG CT | 153-155^{a} | 476-498^{f} |
| 542^{c} | 5′-CGG AAR TAG AAC TGS GGA CGG TAG | 153-155^{a} | 679-702^{f} |
| 541 | 5′-GTK GAA ATG TTC CGC AAG CTG CT | 153-155^{a} | 476-498^{f} |
| 544^{c} | 5′-AYG TTG TCG CCM GGC ATT MCC AT | 153-155^{a} | 749-771^{f} |

^{a}These sequences were aligned to derive the corresponding primer.
^{b}The nucleotide positions refer to the T. brucei tuf (EF-1) sequence fragment
(SEQ ID NO. 864).
^{c}These sequences are from the complementary DNA strand of the sequence of the
originating fragment given in the Sequence Listing.
^{d}The nucleotide positions refer to the E. coli tuf sequence fragment (SEQ ID
NO. 698).
^{e}Sequence from databases.
^{f}The nucleotide positions refer to the P. aeruginosa tuf sequence fragment
(SEQ ID NO. 153).

Originating DNA fragment

| | | | |
|---|---|---|---|
| | | SEQ ID | Nucleotide |
| SEQ ID NO. | Nucleotide sequence | NO. | position |

Parasitical group: Trypanosomatidae family

| | | | |
|---|---|---|---|
| 923 | 5′-GAC GCI GCC ATC CTG ATG ATC | 511, 514-526, | 166-188^{b} |
| | | 529, 840-842, | |
| | | 864^{a} | |
| 924^{c} | 5′-ACC TCA GTC GTC ACG TTG GCG | 511, 514-526, | 648-668^{b} |
| | | 529, 840-842, | |
| | | 864^{a} | |
| 925 | 5′-AAG CAG ATG GTT GTG TGC TG | 511, 514-526, | 274-293^{b} |
| | | 529, 840-842, | |
| | | 864^{a} | |
| 926^{c} | 5′-CAG CTG CTC GTG GTG CAT CTC GAT | 511, 514-526, | 676-699^{b} |
| | | 529, 840-842, | |
| | | 864^{a} | |
| 927 | 5′-ACG CGG AGA AGG TGC GCT T | 511, 514-526, | 389-407^{b} |
| | | 529, 840-842, | |
| | | 864^{a} | |
| 928^{c} | 5′-GGT CGT TCT TCG AGT CAC CGC A | 511, 514-526, | 778-799^{b} |
| | | 529, 840-842, | |
| | | 864^{a} | |

Universal primers (bacteria)

| | | | |
|---|---|---|---|
| 636 | 5′-ACT GGY GTT GAI ATG TTC CGY AA | 7, 54, 78, | 470-492^{d} |
| | | 100, 103, 159, | |
| | | 209, 224, 227^{b} | |
| 637^{c} | 5′-ACG TCA GTI GTA CGG AAR TAG AA | 7, 54, 78, | 692-714^{d} |
| | | 100, 103, 159, | |
| | | 209, 224, 227^{b} | |
| 638 | 5′-CCA ATG CCA CAA ACI CGT GAR CAC AT | 7, 54, 78, | 35-60^{e} |
| | | 100, 103, 159, | |
| | | 209, 224, 227^{b} | |
| 639^{c} | 5′-TTT ACG GAA CAT TTC WAC ACC WGT IAC A | 7, 54, 78, | 469-496^{e} |
| | | 100, 103, 159, | |
| | | 209, 224, 227^{b} | |

^{a}These sequences were aligned to derive the corresponding primer.
^{b}The nucleotide positions refer to the L. tropica tuf (EF-1) sequence fragment
(SEQ ID NO. 526).
^{c}These sequences are from the complementary DNA strand of the sequence of the
originating fragment given in the Sequence Listing.
^{d}The nucleotide positions refer to the E. coli tuf sequence fragment (SEQ ID
NO. 78).
^{e}The nucleotide positions refer to the B. cereus tuf sequence fragment (SEQ ID
NO. 7).

Originating DNA fragment

| | | | |
|---|---|---|---|
| | | SEQ ID | Nucleotide |
| SEQ ID NO. | Nucleotide sequence | NO. | position |

Universal primer (bacteria) (continued)

| | | | |
|---|---|---|---|
| 643 | 5′-ACT GGI GTI GAR ATG TTC CGY AA | 1, 3, 4, 7, 12, | 470-492^{b} |
| | | 13, 16, 49, 54, | |
| | | 72, 78, 85, 88, | |
| | | 91, 94, 98, 103, | |
| | | 108, 112, 115, | |
| | | 116, 120, 121, | |
| | | 126, 128, 134, | |
| | | 136, 146, 154, | |
| | | 159, 179, 186, | |
| | | 205, 209, 212, | |
| | | 224, 238^{a} | |
| 644^{c} | 5′-ACG TCI GTI GTI CKG AAR TAG AA | same as SEQ | 692-714^{b} |
| | | ID NO. 643 | |
| 643 | 5′-ACT GGI GTI GAR ATG TTC CGY AA | 1, 3, 4, 7, 12, | 470-492^{b} |
| | | 13, 16, 49, 54, | |
| | | 72, 78, 85, 88, | |
| | | 91, 94, 98, 103, | |
| | | 108, 112, 115, | |
| | | 116, 120, 121, | |
| | | 126, 128, 134, | |
| | | 136, 146, 154, | |
| | | 159, 179, 186, | |
| | | 205, 209, 212, | |
| | | 224, 238^{a} | |
| 645^{c} | 5′-ACG TCI GTI GTI CKG AAR TAR AA | same as SEQ | 692-714^{b} |
| | | ID NO. 643 | |
| 646 | 5′-ATC GAC AAG CCI TTC YTI ATG SC | 2, 13, 82 | 317-339^{d} |
| | | 122, 145^{a} | |
| 647^{c} | 5′-ACG TCC GTS GTR CGG AAG TAG AAC TG | 2, 13, 82 | 686-711^{d} |
| | | 122, 145^{a} | |
| 646 | 5′-ATC GAC AAG CCI TTC YTI ATG SC | 2, 13, 82 | 317-339^{d} |
| | | 122, 145^{a} | |
| 648^{c} | 5′-ACG TCS GTS GTR CGG AAG TAG AAC TG | 2, 13, 82 | 686-711^{d} |
| | | 122, 145^{a} | |

^{a}These sequences were aligned to derive the corresponding primer.
^{b}The nucleotide positions refer to the E. coli tuf sequence fragment (SEQ ID
NO. 78).
^{c}These sequences are from the complementary DNA strand of the sequence of the
originating fragment given in the Sequence Listing.
^{d}The nucleotide positions refer to the A. meyeri tuf sequence fragment (SEQ ID
NO. 2)

Originating DNA fragment

| | | | |
|---|---|---|---|
| | | SEQ ID | Nucleotide |
| SEQ ID NO. | Nucleotide sequence | NO. | position |

Universal primer (bacteria) (continued)

| | | | |
|---|---|---|---|
| 649 | 5′-GTC CTA TGC CTC ARA CWC GIG AGC AC | 8, 86, 141, 143^{a} | 33-58^{b} |
| 650^{c} | 5′-TTA CGG AAC ATY TCA ACA CCI GT | 8, 86, 141, 143^{a} | 473-495^{b} |
| 636 | 5′-ACT GGY GTT GAI ATG TTC CGY AA | 8, 86, 141, 143^{a} | 473-495^{b} |
| 651^{c} | 5′-TGA CGA CCA CCI TCY TCY TTY TTC A | 8, 86, 141, 143^{a} | 639-663^{b} |

Universal primers (fungi)

| | | | |
|---|---|---|---|
| 1974 | 5′-ACA AGG GIT GGR MSA AGG AGA C | 404, 405, 433, | 443-464^{d} |
| | | 445, 898, 1268, | |
| | | 1276, 1986^{a} | |
| 1975^{c} | 5′-TGR CCR GGG TGG TTR AGG ACG | 404, 405, 433, | 846-866^{d} |
| | | 445, 898, 1268, | |
| | | 1276, 1986^{a} | |
| 1976 | 5′-GAT GGA YTC YGT YAA ITG GGA | 407-412, | 286-306^{e} |
| | | 414-426, 428-431, | |
| | | 439, 443, 447, | |
| | | 448, 622, 624, 665, | |
| | | 1685, 1987-1990^{a} | |
| 1978^{c} | 5′-CAT CIT GYA ATG GYA ATC TYA AT | same as SEQ | 553-575^{e} |
| | | ID NO. 1976 | |
| 1977 | 5′-GAT GGA YTC YGT YAA RTG GGA | same as SEQ | 286-306^{e} |
| | | ID NO. 1976 | |
| 1979^{c} | 5′-CAT CYT GYA ATG GYA ASC TYA AT | same as SEQ | 553-575^{e} |
| | | ID NO. 1976 | |
| 1981 | 5′-TGG ACA CCI SCA AGI GGK CYG | 401-405, | 281-301^{d} |
| | | 433, 435, 436, | |
| | | 438, 444, 445, 449, | |
| | | 453, 455, 457, 779, | |
| | | 781-783, 785, 786, | |
| | | 788-790, 897-903, | |
| | | 1267-1272, 1274-1280, | |
| | | 1282-1287, 1991-1998^{a} | |
| 1980^{c} | 5′-TCR ATG GCI TCI AIR AGR GTY T | same as SEQ | 488-509^{d} |
| | | ID NO. 1981 | |

^{a}These sequences were aligned to derive the corresponding primer.
^{b}The nucleotide positions refer to the B. distasonis tuf sequence fragment
(SEQ ID NO. 8).
^{c}These sequences are from the complementary DNA strand of the sequence of the
originating fragment given in the Sequence Listing.
^{d}The nucleotide positions refer to the A. fumigatus tuf (EF-1) sequence
fragment (SEQ ID NO. 404).
^{e}The nucleotide positions refer to the C. albicans tuf (EF-1) sequence fragment
(SEQ ID NO. 407).

Originating DNA fragment

| | | | |
|---|---|---|---|
| | | SEQ ID | Nucleotide |
| SEQ ID NO. | Nucleotide sequence | NO. | position |

Universal primers (fungi) (continued)

| | | | |
|---|---|---|---|
| 1982 | 5′-TGG ACA CYI SCA AGI GGK CYG | same as SEQ | 281-301^{a} |
| | | ID NO. 1981 | |
| 1980^{b} | 5′-TCR ATG GCI TCI AIR AGR GTY T | same as SEQ | 488-509^{a} |
| | | ID NO. 1981 | |
| 1983 | 5′-CYG AYT GCG CYA TIC TCA TCA | same as SEQ | 143-163^{a} |
| | | ID NO. 1981 | |
| 1980^{b} | 5′-TCR ATG GCI TCI AIR AGR GTY T | same as SEQ | 488-509^{a} |
| | | ID NO. 1981 | |
| 1984 | 5′-CYG AYT GYG CYA TYC TSA TCA | same as SEQ | 143-163^{a} |
| | | ID NO. 1981 | |
| 1980^{b} | 5′-TCR ATG GCI TCI AIR AGR GTY T | same as SEQ | 488-509^{a} |
| | | ID NO. 1981 | |

Sequencing primers

| | | | |
|---|---|---|---|
| 556 | 5′-CGG CGC NAT CYT SGT TGT TGC | 668^{c} | 306-326 |
| 557^{b} | 5′-CCM AGG CAT RAC CAT CTC GGT G | 668^{c} | 1047-1068 |
| 694 | 5′-CGG CGC IAT CYT SGT TGT TGC | 668^{c} | 306-326 |
| 557^{b} | 5′-CCM AGG CAT RAC CAT CTC GGT G | 668^{c} | 1047-1068 |
| 664 | 5′-AAY ATG ATI ACI GGI GCI GCI CAR ATG GA | 619^{c} | 604-632 |
| 652^{b} | 5′-CCW AYA GTI YKI CCI CCY TCY CTI ATA | 619^{c} | 1482-1508 |
| 664 | 5′-AAY ATG ATI ACI GGI GCI GCI CAR ATG GA | 619^{c} | 604-632 |
| 561^{b} | 5′-ACI GTI CGG CCR CCC TCA CGG AT | 619^{c} | 1483-1505 |
| 543 | 5′-ATC TTA GTA GTT TCT GCT GCT GA | 607 | 8-30 |
| 660^{b} | 5′-GTA GAA TTG AGG ACG GTA GTT AG | 607 | 678-700 |
| 658 | 5′-GAT YTA GTC GAT GAT GAA GAA TT | 621 | 116-138 |
| 659^{b} | 5′-GCT TTT TGI GTT TCW GGT TTR AT | 621 | 443-465 |
| 658 | 5′-GAT YTA GTC GAT GAT GAA GAA TT | 621 | 116-138 |
| 661^{b} | 5′-GTA GAA YTG TGG WCG ATA RTT RT | 621 | 678-700 |
| 558 | 5′-TCI TTY AAR TAY GCI TGG GT | 665^{c} | 157-176 |
| 559^{b} | 5′-CCG ACR GCR AYI GTY TGI CKC AT | 665^{c} | 1279-1301 |
| 813 | 5′-AAT CYG TYG AAA TGC AYC ACG A | 665^{c} | 687-708 |
| 559^{b} | 5′-CCG ACR GCR AYI GTY TGI CKC AT | 665^{c} | 1279-1301 |

^{a}The nucleotide positions refer to the A. fumigatus tuf (EF-1) sequence
fragment (SEQ ID NO. 404).
^{b}These sequences are from the complementary DNA strand of the sequence of the
originating fragment given in the Sequence Listing.
^{c}Sequences from databases.

Originating DNA fragment

| | | | |
|---|---|---|---|
| | | SEQ ID | Nucleotide |
| SEQ ID NO. | Nucleotide sequence | NO. | position |

Sequencing primers (continued)

| | | | |
|---|---|---|---|
| 558 | 5′-TCI TTY AAR TAY GCI TGG GT | 665^{a} | 157-176 |
| 815^{b} | 5′-TGG TGC ATY TCK ACR GAC TT | 665^{a} | 686-705 |
| 560 | 5′-GAY TTC ATY AAR AAY ATG ATY AC | 665^{a} | 289-311 |
| 559^{b} | 5′-CCG ACR GCR AYI GTY TGI CKC AT | 665^{a} | 1279-1301 |
| 653 | 5′-GAY TTC ATI AAR AAY ATG AT | 665^{a} | 289-308 |
| 559^{b} | 5′-CCG ACR GCR AYI GTY TGI CKC AT | 665^{a} | 1279-1301 |
| 558 | 5′-TCI TTY AAR TAY GCI TGG GT | 665^{a} | 157-176 |
| 655^{b} | 5′-CCR ATA CCI CMR ATY TTG TA | 665^{a} | 754-773 |
| 654 | 5′-TAC AAR ATY KGI GGT ATY GG | 665^{a} | 754-773 |
| 559^{b} | 5′-CCG ACR GCR AYI GTY TGI CKC AT | 665^{a} | 1279-1301 |
| 696 | 5′-ATI GGI CAY RTI GAY CAY GGI AAR AC | 698^{a} | 52-77 |
| 697^{b} | 5′-CCI ACI GTI CKI CCR CCY TCR CG | 698^{a} | 1132-1154 |
| 911 | 5′-GAC GGM KKC ATG CCG CAR AC | 853 | 22-41 |
| 914^{b} | 5′-GAA RAG CTG CGG RCG RTA GTG | 853 | 700-720 |
| 912 | 5′-GAC GGC GKC ATG CCG CAR AC | 846 | 20-39 |
| 914^{b} | 5′-GAA RAG CTG CGG RCG RTA GTG | 846 | 692-712 |
| 913 | 5′-GAC GGY SYC ATG CCK CAG AC | 843 | 251-270 |
| 915^{b} | 5′-AAA CGC CTG AGG RCG GTA GTT | 843 | 905-925 |
| 916 | 5′-GCC GAG CTG GCC GGC TTC AG | 846 | 422-441 |
| 561^{b} | 5′-ACI GTI CGG CCR CCC TCA CGG AT | 619^{a} | 1483-1505 |
| 664 | 5′-AAY ATG ATI ACI GGI GCI GCI CAR ATG GA | 619^{a} | 604-632 |
| 917^{b} | 5′-TCG TGC TAC CCG TYG CCG CCA T | 846 | 593-614 |

^{a}Sequences from databases.
^{b}These sequences are from the complementary DNA strand of the sequence of the
originating fragment given in the Sequence Listing.

Originating DNA fragment

| | | | |
|---|---|---|---|
| | | SEQ ID | Nucleotide |
| SEQ ID NO. | Nucleotide sequence | NO. | position |

Sequencing primers (continued)

| | | | |
|---|---|---|---|
| 1221 | 5′-GAY ACI CCI GGI CAY GTI GAY TT | 1230^{a} | 292-314 |
| 1226^{b} | 5′-GTI RMR TAI CCR AAC ATY TC | 1230^{a} | 2014-2033 |
| 1222 | 5′-ATY GAY ACI CCI GGI CAY GTI GAY TT | 1230^{a} | 289-314 |
| 1223^{b} | 5′-AYI TCI ARR TGI ARY TCR CCC ATI CC | 1230^{a} | 1408-1433 |
| 1224 | 5′-CCI GYI HTI YTI GAR CCI ATI ATG | 1230^{a} | 1858-1881 |
| 1225^{b} | 5′-TAI CCR AAC ATY TCI SMI ARI GGI AC | 1230^{a} | 2002-2027 |
| 1227 | 5′-GTI CCI YTI KCI GAR ATG TTY GGI TA | 1230^{a} | 2002-2027 |
| 1229^{b} | 5′-TCC ATY TGI GCI GCI CCI GTI ATC AT | 698^{a} | 4-29 |
| 1228 | 5′-GTI CCI YTI KCI GAR ATG TTY GGI TAY GC | 1230^{a} | 2002-2030 |
| 1229^{b} | 5′-TCC ATY TGI GCI GCI CCI GTI ATC AT | 698^{a} | 4-29 |
| 1999 | 5′-CAT GTC AAY ATT GGT ACT ATT GGT CAT GT | 498-500, | 25-53^{d} |
| | | 502, 505, 506, | |
| | | 508, 619, 2004, 2005^{c} | |
| 2000^{b} | 5′-CCA CCY TCI CTC AMG TTG AAR CGT T | same as SEQ | 1133-1157^{d} |
| | | ID NO. 1999 | |
| 2001 | 5′-ACY ACI TTR ACI GCY GCY ATY AC | same as SEQ | 67-89^{d} |
| | | ID NO. 1999 | |
| 2003^{b} | 5′-CAT YTC RAI RTT GTC ACC TGG | same as SEQ | 1072-1092^{d} |
| | | ID NO. 1999 | |
| 2002 | 5′-CCI GAR GAR AGA GCI MGW GGT | same as SEQ | 151-171^{d} |
| | | ID NO. 1999 | |
| 2003^{b} | 5′-CAT YTC RAI RTT GTC ACC TGG | same as SEQ | 1072-1092^{d} |
| | | ID NO. 1999 | |

^{a}Sequences from databases.
^{b}These sequences are from the complementary DNA strand of the sequence
of the originating fragment given in the Sequence Listing.
^{c}These sequences were aligned to derive the corresponding primer.
^{d}The nucleotide positions refer to the C. albicans tuf sequence fragment (SEQ
ID NO. 2004).

Annex II: Specific and ubiquitous primers for nucleic acid
amplification (atpD sequences).

Originating DNA fragment

| | | | |
|---|---|---|---|
| | | SEQ ID | Nucleotide |
| SEQ ID NO. | Nucleotide sequence | NO. | position |

Bacterial species: Acinetobacter baumannii

| | | | |
|---|---|---|---|
| 1690 | 5′-CAG GTC CTG TTG CGA CTG AAG AA | 243 | 186-208 |
| 1691^{b} | 5′-CAC AGA TAA ACC TGA GTG TGC TTT C | 243 | 394-418 |

Bacterial species: Bacteroides fragilis

| | | | |
|---|---|---|---|
| 2134 | 5′-CGC GTG AAG CTT CTG TG | 929 | 184-200 |
| 2135^{b} | 5′-TCT CGC CGT TAT TCA GTT TC | 929 | 395-414 |

Bacterial species: Bordetella pertussis

| | | | |
|---|---|---|---|
| 2180 | 5′-TTC GCC GGC GTG GGC | 1672^{c} | 544-558 |
| 2181^{b} | 5′-AGC GCC ACG CGC AGG | 1672^{c} | 666-680 |

Bacterial species: Enterococcus faecium

| | | | |
|---|---|---|---|
| 1698 | 5′-GGA ATC AAC AGA TGG TTT ACA AA | 292 | 131-153 |
| 1699^{b} | 5′-GCA TCT TCT GGG AAA GGT GT | 292 | 258-277 |
| 1700 | 5′-AAG ATG CGG AAA GAA GCG AA | 292 | 271-290 |
| 1701^{b} | 5′-ATT ATG GAT CAG TTC TTG GAT CA | 292 | 439-461 |

Bacterial species: Klebsiella pneumoniae

| | | | |
|---|---|---|---|
| 1331 | 5′-GCC CTT GAG GTA CAG AAT GGT AAT GAA GTT | 317 | 88-118 |
| 1332^{b} | 5′-GAC CGC GGC GCA GAC CAT CA | 317 | 183-203 |

^{a}These sequences were aligned to derive the corresponding primer.
^{b}These sequences are from the complementary DNA strand of the sequence of the
originating fragment given in the Sequence Listing.
^{c}Sequence from databases.

Originating DNA fragment

| | | | |
|---|---|---|---|
| | | SEQ ID | Nucleotide |
| SEQ ID NO. | Nucleotide sequence | NO. | position |

Bacterial species: Streptococcus agalactiae

| | | | |
|---|---|---|---|
| 627 | 5′-ATT GTC TAT AAA AAT GGC GAT AAG TC | 379-383^{a} | 42-67^{b} |
| 625^{c} | 5′-CGT TGA AGA CAC GAC CCA AAG TAT CC | 379-383^{a} | 206-231^{b} |
| 628 | 5′-AAA ATG GCG ATA AGT CAC AAA AAG TA | 379-383^{a} | 52-77^{b} |
| 625^{c} | 5′-CGT TGA AGA CAC GAC CCA AAG TAT CC | 379-383^{a} | 206-231^{b} |
| 627 | 5′-ATT GTC TAT AAA AAT GGC GAT AAG TC | 379-383^{a} | 42-67^{b} |
| 626^{c} | 5′-TAC CAC CTT TTA AGT AAG GTG CTA AT | 379-383^{a} | 371-396^{b} |
| 628 | 5′-AAA ATG GCG ATA AGT CAC AAA AAG TA | 379-383^{a} | 52-77^{b} |
| 626^{c} | 5′-TAC CAC CTT TTA AGT AAG GTG CTA AT | 379-383^{a} | 371-396^{b} |

Bacterial group: Campylobacter jejuni and C. coli

| | | | |
|---|---|---|---|
| 2131 | 5′-AAG CMA TTG TTG TAA ATT TTG AAA G | 1576, 1600, | 7-31^{e} |
| | | 1849, 1863, 2139^{d,a} | |
| 2132^{c} | 5′-TCA TAT CCA TAG CAA TAG TTC TA | 1576, 1600, | 92-114^{e} |
| | | 1849, 1863, 2139^{d,a} | |

Bacterial genus: Bordetella sp.

| | | | |
|---|---|---|---|
| 825 | 5′-ATG AGC ARC GSA ACC ATC GTT CAG TG | 1672^{d} | 1-26 |
| 826^{c} | 5′-TCG ATC GTG CCG ACC ATG TAG AAC GC | 1672^{d} | 1342-1367 |

Fungal genus: Candida sp.

| | | | |
|---|---|---|---|
| 634 | 5′-AAC ACY GTC AGR RCI ATT GCY ATG GA | 460-472, | 101-126^{f} |
| | | 474-478^{a} | |
| 635^{c} | 5′-AAA CCR GTI ARR GCR ACT CTI GCT CT | 460-472, | 617-642^{f} |
| | | 474-478^{a} | |

^{a}These sequences were aligned to derive the corresponding primer.
^{b}The nucleotide positions refer to the S. agalactiae atpD sequence fragment
(SEQ ID NO. 380).
^{c}These sequences are from the complementary DNA strand of the sequence of the
originating fragment given in the Sequence Listing.
^{d}Sequence from databases.
^{e}The nucleotide positions refer to the C. jejuni atpD sequence fragment (SEQ
ID NO. 1576).
^{f}The nucleotide positions refer to the C. albicans atpD sequence fragment (SEQ
ID NO. 460).

Originating DNA fragment

| | | | |
|---|---|---|---|
| | | SEQ ID | Nucleotide |
| SEQ ID NO. | Nucleotide sequence | NO. | position |

Universal primers

| | | | |
|---|---|---|---|
| 562 | 5′-CAR ATG RAY GAR CCI CCI GGI GYI MGI ATG | 243, 244, 262, | 528-557^{b} |
| | | 264, 280, 284, | |
| | | 291, 297, 309, | |
| | | 311, 315, 317, | |
| | | 324, 329, 332, | |
| | | 334-336, 339, | |
| | | 342, 343, 351, | |
| | | 356, 357, 364-366, | |
| | | 370, 375, | |
| | | 379, 393^{a} | |
| 563^{c} | 5′-GGY TGR TAI CCI ACI GCI GAI GGC AT | 243, 244, 262, | 687-712^{b} |
| | | 264, 280, 284, | |
| | | 291, 297, 309, | |
| | | 311, 315, 317, | |
| | | 324, 329, 332, | |
| | | 334-336, 339, | |
| | | 342, 343, 351, | |
| | | 356, 357, 364-366, | |
| | | 370, 375, | |
| | | 379, 393^{a} | |
| 564 | 5′-TAY GGI CAR ATG AAY GAR CCI CCI GGI AA | 243, 244, 262, | 522-550^{b} |
| | | 264, 280, 284, | |
| | | 291, 297, 309, | |
| | | 311, 315, 317, | |
| | | 324, 329, 332, | |
| | | 334-336, 339, | |
| | | 342, 343, 351, | |
| | | 356, 357, 364-366, | |
| | | 370, 375, | |
| | | 379, 393^{a} | |
| 565^{c} | 5′-GGY TGR TAI CCI ACI GCI GAT GGD AT | 243, 244, 262, | 687-712^{b} |
| | | 264, 280, 284, | |
| | | 291, 297, 309, | |
| | | 311, 315, 317, | |
| | | 324, 329, 332, | |
| | | 334-336, 339, | |
| | | 342, 343, 351, | |
| | | 356, 357, 364-366, | |
| | | 370, 375, | |
| | | 379, 393^{a} | |

^{a}These sequences were aligned to derive the corresponding primer.
^{b}The nucleotide positions refer to the K. pneumoniae atpD sequence fragment
(SEQ ID NO. 317).
^{c}These sequences are from the complementary DNA strand of the sequence of the
originating fragment given in the Sequence Listing.

Originating DNA fragment

| | | | |
|---|---|---|---|
| | | SEQ ID | Nucleotide |
| SEQ ID NO. | Nucleotide sequence | NO. | position |

Universal primers (continued)

| | | | |
|---|---|---|---|
| 640 | 5′-TCC ATG GTI TWY GGI CAR ATG AA | 248, 284, 315, | 513-535^{b} |
| | | 317, 343, 357, | |
| | | 366, 370, 379, 393^{a} | |
| 641^{c} | 5′-TGA TAA CCW ACI GCI GAI GGC ATA CG | 248, 284, 315, | 684-709^{b} |
| | | 317, 343, 357, | |
| | | 366, 370, 379, 393^{a} | |
| 642 | 5′-GGC GTI GGI GAR CGI ACI CGT GA | 248, 284, 315, | 438-460^{b} |
| | | 317, 343, 357, | |
| | | 366, 370, 379, 393^{a} | |
| 641^{c} | 5′-TGA TAA CCW ACI GCI GAI GGC ATA CG | 248, 284, 315, | 684-709^{b} |
| | | 317, 343, 357, | |
| | | 366, 370, 379, 393^{a} | |

Sequencing primers

| | | | |
|---|---|---|---|
| 566 | 5′-TTY GGI GGI GCI GGI GTI GGI AAR AC | 669^{d} | 445-470 |
| 567^{c} | 5′-TCR TCI GCI GGI ACR TAI AYI GCY TG | 669^{d} | 883-908 |
| 566 | 5′-TTY GGI GGI GCI GGI GTI GGI AAR AC | 669^{d} | 445-470 |
| 814 | 5′-GCI GGC ACG TAC ACI GCC TG | 666^{d} | 901-920 |
| 568 | 5′-RTI ATI GGI GCI GTI RTI GAY GT | 669^{d} | 25-47 |
| 567^{c} | 5′-TCR TCI GCI GGI ACR TAI AYI GCY TG | 669^{d} | 883-908 |
| 570 | 5′-RTI RYI GGI CCI GTI RTI GAY GT | 672^{d} | 31-53 |
| 567^{c} | 5′-TCR TCI GCI GGI ACR TAI AYI GCY TG | 669^{d} | 883-908 |
| 572 | 5′-RTI RTI GGI SCI GTI RTI GA | 669^{d} | 25-44 |
| 567^{c} | 5′-TCR TCI GCI GGI ACR TAI AYI GCY TG | 669^{d} | 883-908 |
| 569 | 5′-RTI RTI GGI SCI GTI RTI GAT AT | 671^{d} | 31-53 |
| 567^{c} | 5′-TCR TCI GCI GGI ACR TAI AYI GCY TG | 669^{d} | 883-908 |
| 571 | 5′-RTI RTI GGI CCI GTI RTI GAT GT | 670^{d} | 31-53 |
| 567^{c} | 5′-TCR TCI GCI GGI ACR TAI AYI GCY TG | 669^{d} | 883-908 |

^{a} These sequences were aligned to derive the corresponding primer.
^{b} The nucleotide positions refer to the K. pneumoniae atpD sequence fragment
(SEQ ID NO. 317).
^{c} These sequences are from the complementary DNA strand of the sequence of the
originating fragment given in the Sequence Listing.
^{d} Sequences from databases.

Originating DNA fragment

| | | | |
|---|---|---|---|
| | | SEQ ID | Nucleotide |
| SEQ ID NO. | Nucleotide sequence | NO. | position |

Sequencing primers (continued)

| | | | |
|---|---|---|---|
| 700 | 5′-TIR TIG AYG TCG ART TCC CTC ARG | 669^{a} | 38-61 |
| 567^{b} | 5′-TCR TCI GCI GGI ACR TAI AYI GCY TG | 669^{a} | 883-908 |
| 568 | 5′-RTI ATI GGI GCI GTI RTI GAY GT | 669^{a} | 25-47 |
| 573^{b} | 5′-CCI CCI ACC ATR TAR AAI GC | 666^{a} | 1465-1484 |
| 574 | 5′-ATI GCI ATG GAY GGI ACI GAR GG | 666^{a} | 283-305 |
| 573^{b} | 5′-CCI CCI ACC ATR TAR AAI GC | 666^{a} | 1465-1484 |
| 574 | 5′-ATI GCI ATG GAY GGI ACI GAR GG | 666^{a} | 283-305 |
| 708^{b} | 5′-TCR TCC ATI CCI ARI ATI GCI ATI AT | 666^{a} | 1258-1283 |
| 681 | 5′-GGI SSI TTY GGI ISI GGI AAR AC | 685 | 694-716 |
| 682^{b} | 5′-GTI ACI GGY TCY TCR AAR TTI CCI CC | 686 | 1177-1202 |
| 681 | 5′-GGI SSI TTY GGI ISI GGI AAR AC | 685 | 694-716 |
| 683^{b} | 5′-GTI ACI GGI TCI SWI AWR TCI CCI CC | 685 | 1180-1205 |
| 681 | 5′-GGI SSI TTY GGI ISI GGI AAR AC | 685 | 694-716 |
| 699 | 5′-GTI ACI GGY TCY TYR ARR TTI CCI CC | 686 | 1177-1202 |
| 681 | 5′-GGI SSI TTY GGI ISI GGI AAR AC | 685 | 694-716 |
| 812^{b} | 5′-GTI ACI GGI TCY TYR ARR TTI CCI CC | 685 | 1180-1205 |
| 1213 | 5′-AAR GGI GGI ACI GCI GCI ATH CCI GG | 714^{a} | 697-722 |
| 1212^{b} | 5′-CCI CCI RGI GGI GAI ACI GCW CC | 714^{a} | 1189-1211 |
| 1203 | 5′-GGI GAR MGI GGI AAY GAR ATG | 709^{a} | 724-744 |
| 1207^{b} | 5′-CCI TCI TCW CCI GGC ATY TC | 709^{a} | 985-1004 |
| 1204 | 5′-GCI AAY AAC ITC IWM YAT GCC | 709^{a} | 822-842 |
| 1206^{b} | 5′-CKI SRI GTI GAR TCI GCC A | 709^{a} | 926-944 |
| 1205 | 5′-AAY ACI TCI AWY ATG CCI GT | 709^{a} | 826-845 |
| 1207^{b} | 5′-CCI TCI TCW CCI GGC ATY TC | 709^{a} | 985-1004 |
| 2282 | 5′-AGR RGC IMA RAT GTA TGA | 714^{a} | 84-101 |
| 2284^{b} | 5′-TCT GWG TRA CIG GYT CKG AGA | 714^{a} | 1217-1237 |
| 2283 | 5′-ATI TAT GAY GGK ITT CAG AGG C | 714^{a} | 271-292 |
| 2285^{b} | 5′-CMC CIC CWG GTG GWG AWA C | 714^{a} | 1195-1213 |

^{a}Sequences from databases.
^{b}These sequences are from the complementary DNA strand of the sequence of the
originating fragment given in the Sequence Listing.

Annex III: Internal hybridization probes for specific detection
of tuf sequences.

Originating DNA fragment

| | | | |
|---|---|---|---|
| | | SEQ ID | Nucleotide |
| SEQ ID NO. | Nucleotide sequence | NO. | position |

Bacterial species: Abiotrophia adiacens

| | | | |
|---|---|---|---|
| 2170 | 5′-ACG TGA CGT TGA CAA ACC A | 1715 | 313-331 |

Bacterial species: Chlamydia pneumoniae

| | | | |
|---|---|---|---|
| 2089 | 5′-ATG CTG AAC TTA TTG ACC TT | 20 | 136-155 |
| 2090 | 5′-CGT TAC TGG AGT CGA AAT G | 20 | 467-485 |

Bacterial species: Enterococcus faecalis

| | | | |
|---|---|---|---|
| 580 | 5′-GCT AAA CCA GCT ACA ATC ACT CCA C | 62-63, 607^{a} | 584-608^{b} |
| 603 | 5′-GGT ATT AAA GAC GAA ACA TC | 62-63, 607^{a} | 440-459^{b} |
| 1174 | 5′-GAA CGT GGT GAA GTT CGC | 62-63, 607^{a} | 398-415^{b} |

Bacterial species: Enterococcus faecium

| | | | |
|---|---|---|---|
| 602 | 5′-AAG TTG AAG TTG TTG GTA TT | 64, 608^{a} | 426-445^{c} |

Bacterial species: Enterococcus gallinarum

| | | | |
|---|---|---|---|
| 604 | 5′-GGT GAT GAA GTA GAA ATC GT | 66, 609^{a} | 419-438^{d} |

Bacterial species: Escherichia coli

| | | | |
|---|---|---|---|
| 579 | 5′-GAA GGC CGT GCT GGT GAG AA | 78 | 503-522 |
| 2168 | 5′-CAT CAA AGT TGG TGA AGA AGT TG | 78 | 409-431 |

Bacterial species: Neisseria gonorrhoeae

| | | | |
|---|---|---|---|
| 2166 | 5′-GAC AAA CCA TTC CTG CTG | 126 | 322-339^{e} |

Fungal species: Candida albicans

| | | | |
|---|---|---|---|
| 577 | 5′-CAT GAT TGA ACC ATC CAC CA | 407-411^{a} | 406-425^{f} |

Fungal species: Candida dubliniensis

| | | | |
|---|---|---|---|
| 578 | 5′-CAT GAT TGA AGC TTC CAC CA | 412, 414-415^{a} | 418-437^{g} |

^{a}These sequences were aligned to derive the corresponding primer.
^{b}The nucleotide positions refer to the E. faecalis tuf sequence fragment (SEQ
ID NO. 607).
^{c}The nucleotide positions refer to the E. faecium tuf sequence fragment (SEQ
ID NO. 608).
^{d}The nucleotide positions refer to the E. gallinarum tuf sequence fragment
(SEQ ID NO. 609).
^{e}The nucleotide positions refer to the N. gonorrhoeae tuf sequence fragment
(SEQ ID NO. 126).
^{f}The nucleotide positions refer to the C. albicans tuf(EF-1) sequence fragment
(SEQ ID NO. 408).
^{g}The nucleotide positions refer to the C. dubliniensis tuf(EF-1) sequence
fragment (SEQ ID NO. 414).

Originating DNA fragment

| | | | |
|---|---|---|---|
| | | SEQ ID | Nucleotide |
| SEQ ID NO. | Nucleotide sequence | NO. | position |

Bacterial species: Haemophilus influenzae

| | | | |
|---|---|---|---|
| 581 | 5′-ACA TCG GTG CAT TAT TAC GTG G | 610^{a} | 551-572 |

Bacterial species: Mycoplasma pneumoniae

| | | | |
|---|---|---|---|
| 2095 | 5′-CGG TCG GGT TGA ACG TGG | 2097^{a} | 687-704 |

Bacterial species: Staphylococcus aureus

| | | | |
|---|---|---|---|
| 584 | 5′-ACA TGA CAC ATC TAA AAC AA | 176-180^{b} | 369-388^{c} |
| 585 | 5′-ACC ACA TAC TGA ATT CAA AG | 176-180^{b} | 525-544^{c} |
| 586 | 5′-CAG AAG TAT ACG TAT TAT CA | 176-180^{b} | 545-564^{c} |
| 587 | 5′-CGT ATT ATC AAA AGA CGA AG | 176-180^{b} | 555-574^{c} |
| 588 | 5′-TCT TCT CAA ACT ATC GTC CA | 176-180^{b} | 593-612^{c} |

Bacterial species: Staphylococcus epidermidis

| | | | |
|---|---|---|---|
| 589 | 5′-GCA CGA AAC TTC TAA AAC AA | 185, 611^{b} | 445-464^{d} |
| 590 | 5′-TAT ACG TAT TAT CTA AAG AT | 185, 611^{b} | 627-646^{d} |
| 591 | 5′-TCC TGG TTC TAT TAC ACC AC | 185, 611^{b} | 586-605^{d} |
| 592 | 5′-CAA AGC TGA AGT ATA CGT AT | 185, 611^{b} | 616-635^{d} |
| 593 | 5′-TTC ACT AAC TAT CGC CCA CA | 185, 611^{b} | 671-690^{d} |

Bacterial species: Staphylococcus haemolyticus

| | | | |
|---|---|---|---|
| 594 | 5′-ATT GGT ATC CAT GAC ACT TC | 186, 188-190^{b} | 437-456^{e} |
| 595 | 5′-TTA AAG CAG ACG TAT ACG TT | 186, 188-190^{b} | 615-634^{e} |

Bacterial species: Staphylococcus hominis

| | | | |
|---|---|---|---|
| 596 | 5′-GAA ATT ATT GGT ATC AAA GA | 191, 193-196^{b} | 431-450^{f} |
| 597 | 5′-ATT GGT ATC AAA GAA ACT TC | 191, 193-196^{b} | 437-456^{f} |
| 598 | 5′-AAT TAC ACC TCA CAC AAA AT | 191, 193-196^{b} | 595-614^{f} |

^{a}Sequences from databases.
^{b}These sequences were aligned to derive the corresponding probe.
^{c}The nucleotide positions refer to the S. aureus tuf sequence fragment (SEQ ID
NO. 179).
^{d}The nucleotide positions refer to the S. epidermidis tuf sequence fragment
(SEQ ID NO. 611).
^{e}The nucleotide positions refer to the S. haemolyticus tuf sequence fragment
(SEQ ID NO. 186).
^{f}The nucleotide positions refer to the S. hominis tuf sequence fragment (SEQ
ID NO. 191).

Originating DNA fragment

| | | | |
|---|---|---|---|
| | | SEQ ID | Nucleotide |
| SEQ ID NO. | Nucleotide sequence | NO. | position |

Bacterial species: Staphylococcus saprophyticus

| | | | |
|---|---|---|---|
| 599 | 5′-CGG TGA AGA AAT CGA AAT CA | 198-200^{a} | 406-425^{b} |
| 600 | 5′-ATG CAA GAA GAA TCA AGC AA | 198-200^{a} | 431-450^{b} |
| 601 | 5′-GTT TCA CGT GAT GAT GTA CA | 198-200^{a} | 536-555^{b} |
| 695 | 5′-GTT TCA CGT GAT GAC GTA CA | 198-200^{a} | 563-582^{b} |

Bacterial species: Streptococcus agalactiae

| | | | |
|---|---|---|---|
| 582^{c} | 5′-TTT CAA CTT CGT CGT TGA CAC GAA CAG T | 207-210^{a} | 404-431^{d} |
| 583^{c} | 5′-CAA CTG CTT TTT GGA TAT CTT CTT TAA TAC CAA CG | 207-210^{a} | 433-467^{d} |
| 1199 | 5′-GTA TTA AAG AAG ATA TCC AAA AAG C | 207-210^{a} | 438-462^{d} |

Bacterial species: Streptococcus pneumoniae

| | | | |
|---|---|---|---|
| 1201 | 5′-TCA AAG AAG AAA CTA AAA AAG CTG T | 971, 977, | 513-537^{e} |
| | | 979, 986^{a} | |

Bacterial species: Streptococcus pyogenes

| | | | |
|---|---|---|---|
| 1200 | 5′-TCA AAG AAG AAA CTA AAA AAG CTG T | 1002 | 473-497 |

Bacterial group: Enterococcus casseliflavus-flavescens-
gallinarum group

| | | | |
|---|---|---|---|
| 620 | 5′-ATT GGT GCA TTG CTA CGT | 58, 65, 66^{a} | 527-544^{f} |
| 1122 | 5′-TGG TGC ATT GCT ACG TGG | 58, 65, 66^{a} | 529-546^{f} |

Bacterial group: Enterococcus sp., Gemella sp., A. adiacens

| | | | |
|---|---|---|---|
| 2172 | 5′-GTG TTG AAA TGT TCC GTA AA | 58-62, 67-71, | 477-496^{g} |
| | | 87-88, 607-609, | |
| | | 727, 871 | |
| | | 1715, 1722^{a} | |

^{a}These sequences were aligned to derive the corresponding primer.
^{b} The nucleotide positions refer to the S. saprophyticus tuf sequence fragment
(SEQ ID NO. 198).
^{c}These sequences are from the complementary DNA strand of the sequence of the
originating fragment given in the Sequence Listing.
^{d}The nucleotide positions refer to the S. agalactiae tuf sequence fragment
(SEQ ID NO. 209).
^{e}The nucleotide positions refer to the S. pneumoniae tuf sequence fragment
(SEQ ID NO. 986).
^{f}The nucleotide positions refer to the E. flavescens tuf sequence fragment
(SEQ ID NO. 65).
^{g}The nucleotide positions refer to the E. faecium tuf sequence fragment (SEQ
ID NO. 608).

Originating DNA fragment

| | | | |
|---|---|---|---|
| | | SEQ ID | Nucleotide |
| SEQ ID NO. | Nucleotide sequence | NO. | position |

Bacterial genus: Gemella

| | | | |
|---|---|---|---|
| 2171 | 5′-TCG TTG GAT TAA CTG AAG AA | 87, 88^{a} | 430-449^{b} |

Bacterial genus: Staphylococcus sp.

| | | | |
|---|---|---|---|
| 605 | 5′-GAA ATG TTC CGT AAA TTA TT | 176-203^{a} | 403-422^{c} |
| 606 | 5′-ATT AGA CTA CGC TGA AGC TG | 176-203^{a} | 420-439^{c} |
| 1175 | 5′-GTT ACT GGT GTA GAA ATG TTC | 176-203^{a} | 391-411^{c} |
| 1176 | 5′-TAC TGG TGT AGA AAT GTT C | 176-203^{a} | 393-411^{c} |

Bacterial genus: Streptococcus sp.

| | | | |
|---|---|---|---|
| 1202 | 5′-GTG TTG AAA TGT TCC GTA AAC A | 206-231, 971, | 466-487^{d} |
| | | 977, 979, 982-986^{a} | |

Fungal species: Candida albicans

| | | | |
|---|---|---|---|
| 1156 | 5′-GTT GAA ATG CAT CAC GAA CAA TT | 407-412, 624^{a} | 680-702^{e} |

Fungal group: Candida albicans and C. tropicalis

| | | | |
|---|---|---|---|
| 1160 | 5′-CGT TTC TGT TAA AGA AAT TAG AAG | 407-412, | 748-771^{e} |
| | | 429, 624^{a} | |

Fungal species: Candida dubliniensis

| | | | |
|---|---|---|---|
| 1166 | 5′-ACG TTA AGA ATG TTT CTG TCA A | 414-415^{a} | 750-771^{f} |
| 1168 | 5′-GAA CAA TTG GTT GAA GGT GT | 414-415^{a} | 707-726^{f} |

Fungal species: Candida glabrata

| | | | |
|---|---|---|---|
| 1158 | 5′-AAG AGG TAA TGT CTG TGG T | 417 | 781-799 |
| 1159 | 5′-TGA AGG TTT GCC AGG TGA | 417 | 718-735 |

Fungal species: Candida krusei

| | | | |
|---|---|---|---|
| 1161 | 5′-TCC AGG TGA TAA CGT TGG | 422 | 720-737 |

^{a}These sequences were aligned to derive the corresponding primer.
^{b}The nucleotide positions refer to the G. haemolysans tuf sequence fragment
(SEQ ID NO. 87).
^{c}The nucleotide positions refer to the S. aureus tuf sequence fragment (SEQ ID
NO. 179).
^{d}The nucleotide positions refer to the S. pneumoniae tuf sequence fragment
(SEQ ID NO. 986).
^{e}The nucleotide positions refer to the C. albicans tuf(EF-1) sequence fragment
(SEQ ID NO. 408).
^{f}The nucleotide positions refer to the C. dubliniensis tuf(EF-1) sequence
fragment (SEQ ID NO. 414).

Originating DNA fragment

| | | | |
|---|---|---|---|
| | | SEQ ID | Nucleotide |
| SEQ ID NO. | Nucleotide sequence | NO. | position |

Fungal group: Candida lusitaniae and C. guillermondii

| | | | |
|---|---|---|---|
| 1162 | 5′-CAA GTC CGT GGA AAT GCA | 418, 424^{a} | 682-699^{b} |

Fungal species: Candida parapsilosis

| | | | |
|---|---|---|---|
| 1157 | 5′-AAG AAC GTT TCA GTT AAG GAA AT | 426 | 749-771 |

Fungal species: Candida zeylanoides

| | | | |
|---|---|---|---|
| 1165 | 5′-GGT TTC AAC GTG AAG AAC | 432 | 713-730 |

Fungal genus: Candida sp.

| | | | |
|---|---|---|---|
| 1163 | 5′-GTT GGT TTC AAC GTT AAG AAC | 407-412, 414-415, | 728-748^{c} |
| | | 417, 418, | |
| | | 422, 429^{a} | |
| 1164 | 5′-GGT TTC AAC GTC AAG AAC | 413, 416, 420, | 740-757^{b} |
| | | 421, 424, 425, | |
| | | 426, 428, 431^{a} | |
| 1167 | 5′-GTT GGT TTC AAC GT | 406-426, 428-432, | 728-741^{c} |
| | | 624^{a} | |

^{a}These sequences were aligned to derive the corresponding primer.
^{b}The nucleotide positions refer to the C. lusitaniae tuf(EF-1) sequence
fragment (SEQ ID NO. 424).
^{c}The nucleotide positions refer to the C. albicans tuf(EF-1) sequence fragment
(SEQ ID NO. 408).

| Annex IV: Strategy for the selection of amplification/sequencing primers from | | | |
|---|---|---|---|
| atpD (F-type) sequences. | | | |
| | | SEQ ID | |
| | 23 49 443 472 881 910 | NO.: | Accession #: |
| B. cepacia | AGTgCAT CGGCGCCGTT ATCGACGTGG...TGTTCG GCGGTGCTGG CGTGGGCAAG ACCG...TCCA GGCCGTGT ACGTCCCTGC GGACGACT | — | X76877 |
| B. pertussis | AGTgCAT CGGCGCCGTG GTGGATATTC...TGTTCG GCGGCGCCGG CGTGGGCAAG ACCG...TCCA GGCCGTGT ACGTGCCTGC CGACGACT | — | Genome project |
| P. aeruginosa | AAATCAT CGGCGCCGTG ATCGACGTGG...TGTTCG GCGGCGCCGG CGTGGGCAAG ACCG...TCCA GGCCGTAT ACGTTCCCGC GGACGACC | — | Genome project |
| E. coli | AGGTAAT CGGCGCCGTA GTTGACGTCG...TGTTCG GTGGTGCGGG TGTAGGTAAA ACCG...TACA GGCAGTAT ACGTACCTGC GGATGACT | — | J01594 |
| N. gonorrhoeae | AAATTAT CGGTGCGGTT GTTGACGTGG...TGTTCG GCGGTGCCGG TGTGGGTAAA ACCG...TCCA AGCCGTAT ATGTACCTGC GGATGACT | — | Genome project |
| M. thermoacetica | AGGTTAT TGGCCCGGTG GTTGACGTCG...TCTTCG GCGGCGCCGG GGTCGGCAAG ACGG...TGCA AGCTATCT ATGTGCCGGC CGACGACC | — | U64318 |
| S. aurantiaca | AGGTTcT CGGTCCCGTG ATTGACGTGG...TGTTCG GCGGCGCCGG CGTGGGCAAG ACGG...TGCA GGCCATCT ACGTGCCCGC CGACGACC | — | X76879 |
| M. tuberculosis | GGGTCAC TGGGCCCGTC GTCGACGTCG...TGTTCG GCGGTGCCGG GGTGGGCAAG ACGG...TGCA AGCCGTCT ACGTGCCCGC CGACGACT | — | Z73419 |
| B. fragilis | AGGTAAT TGGCCCTGTG GTCGATGTGT...TGTTTG GCGGGGCCGG AGTGGGTAAA ACTG...TGCA GGCTGTTT ACGTACCGGC TGATGACT | — | M22247 |
| C. lytica | AAATTAT TGGCCCAGTT ATAGATGTGG...TATTTG GAGGTGCCGG AGTAGGTAAA ACAG...TACA GGCGGTTT ACGTACCTGC GGATGATT | 672 | M22535 |
| A. woodii | AGGTTAT TGGACCAGTA GTCGATGTTA...TTTTCG GTGGTGCCGG AGTTGGTAAA ACCG...TTCA GGCCGTTT ACGaTCCAGC CGATGACT | — | U10505 |
| C. acetobutylicum | AGGTAAT AGGACCTGTT GTGGATATTA...TGTTCG GTGGTGCCGG TGTTGGTAAA ACAG...TTCA GGCTGTAT ATGTTCCTGC TGATGACC | 671 | AF101055 |
| M. pneumoniae | AAGTGAT TGGCCCGGTA GTTGATGTCA...TATTTG GTGGTGCTGG TGTTGGTAAA ACGG...TGCA AGCGATCT ATGTGCCAGC TGATGACT | — | U43738 |
| H. pylori | AGGTTtT AGGCCCGGTG GTAGATGTGG...TGTTTG GTGGGGCTGG CGTAGGCAAA ACGG...TTCA AGCGGTGT ATGTGCCAGC AGACGACT | 670 | AF004014 |
| Selected sequences | RTIAT IGGIGCIGTI RTIGAYGT | 568 | |
| for universal primers | RTIRY IGGICCIGTI RTIGAYGT | 570 | |
| | RTIRT IGGISCIGTI RTIGA | 572 | |
| | RTIRT IGGISCIGTI RTIGATAT | 569 | |
| | RTIRT IGGICCIGTI RTIGATGT | 571 | |
| | TTYG GIGGIGCIGG IGTIGGIAAR AC | 566 | |
| Selected sequence | CA RGCIRTIT AYGTICCIGC IGAYGA | 567 | |
| for universal primer^{a} | | | |

The sequence numbering refers to the Escherichia coli atpD gene fragment (SEQ ID NO. 669). Nucleotides in capitals are identical to the selected sequences or match those sequences. Mismatches are indicated by lower-case letters. Dots indicate gaps in the sequences displayed.
“R” “Y” “M” “K” “W” and “S” designate nucleotide positions which are degenerated. “R” stands for A or G; “Y” stands for C or T; “M” stands for A or C; “K” stands for G or T; “W” stands for A or T; “S” stands for C or G. “I” stands for inosine which is a nucleotide analog that can bind to any of the four nucleotides A, C, G or T.
^{a}This sequence is the reverse-complement of the selected primer.

Annex V: Strategy for the selection of universal amplification/sequencing
primers from atpD (V-type) sequences.

| | | SEQ |
|---|---|---|
| | 691 719 1177 1208 | ID NO.: |
| E. hirae | CC AGGTCCGTTT GGTGCAGGGA AGACAGT...TCTGGTGGAg ATaTCtctGA ACCAGTGACT CA | 685 |
| H. salinarum | CC GGGGCCGTTC GGGTCCGGGA AGACGGT...CCCGGCGGGg ACTTCtccGA GCCGGTCACC CA | 687 |
| T. thermophilus | CC TGGGCCCTTC GGCAGCGGCA AGACCGT...CCGGGCGGCg ACaTgtccGA GCCCGTGACC CA | 693 |
| Human | CC TGGGGCCTTC GGATGTGGCA AGACTGT...CCCGGTGGAg ACTTCtcAGA tCCCGTGACG AC | 688 |
| T. congolense | CC TGGCGCGTTT GGATGCGGAA AGACGGT...CCTGGAGGTg ACTTTtctGA cCCAGTGACG TC | 692 |
| P. falciparum | CC TGGTGCATTT GGTTGTGGAA AAACTTG...CCAGGTGGTg ATTTCtctGA cCCTGTAACT AC | 689 |
| C. pneumoniae | CC AGGACCTTTT GGTGCAGGGA AAACAGT...GCAGGAGGAA ACTTTGAAGA ACCAGTCACT CA | 686 |
| Selected sequences | GGISSITTY GGIISIGGIA ARAC | 681 |
| for universal primers | | |
| Selected sequences | GGIGGIA AYTTYGARGA RCCIGTIAC | 682 |
| for universal primers^{a} | GGIGGIG AYWTIWSIGA ICCIGTIAC | 683 |

The sequence numbering refers to the Enterococcus hirae atpD gene fragment (SEQ ID NO. 685). Nucleotides in capitals are identical to the selected sequences or match those sequences. Mismatches for SEQ ID NOs. 681 and 682 are indicated by lower-case letters. Mismatches for SEQ ID NO. 683 are indicated by underlined nucleotides. Dots indicate gaps in the sequences displayed.
“R” “Y” “M” “K” “W” and “S” designate nucleotide positions which are degenerated. “R” stands for A or G; “Y” stands for C or T; “M” stands for A or C; “K” stands for G or T; “W” stands for A or T; “S” stands for C or G. “I” stands for inosine which is a nucleotide analog that can bind to any of the four nucleotides A, C, G or T.
^{a}These sequences are the reverse-complement of the selected primers.

Annex VI: Strategy for the selection
of universal amplification/sequencing
primers from tuf (M) sequences
(organelle origin).

| | 601 635 |
|---|---|
| C. neoformans^{a} | AAGAA CATGATCACC GGTaCCtCCC AGgctGACTG... |
| S. cerevisiae^{a} | AAGAA CATGATTACT GGTaCTtCTC AAgctGACTG... |
| O. volvulus^{a} | AAGAA TATGATCACA GGTaCTtCTC AGgctGACTG... |
| Human^{a} | AAAAA CATGATTACA GGGaCAtCTC AGgctGACTG... |
| G. maxB1^{b} | AAGAA CATGATCACC GGCGCTGCCC AGATGGACGG... |
| G. maxB2^{b} | AAAAA CATGATCACC GGCGCCGCCC AGATGGACGG... |
| E. coli^{c} | AAAAA CATGATCACC GGTGCTGCTC AGATGGACGG... |
| S. aureofaciens^{c} | AAGAA CATGATCACC GGTGCCGCCC AGATGGACGG... |
| E. tenella^{b} | AAAAA TATGATTACA GGAGCAGCAC AAATGGATGG... |
| T. gondii^{b} | AAGAA TATGATTACT GGAGCCGCAC AAATGGATGG... |
| S. cerevisiae^{b} | AAGAA TATGATTACC GGTGCTGCTC AAATGGATGG... |
| A. thaliana^{b} | AAAAA TATGATTACT GGAGCTGCGC AAATGGATGG... |
| Selected sequence for | AA YATGATIACI GGIGCIGCIC ARATGGA |
| universal primer | |
| Selected sequences | |
| for universal primers | |

| | | SEQ | |
|---|---|---|---|
| | | ID | Accession |
| | 1479 1511 | NO.: | #: |
| C. neoformans^{a} | CGCcgTCcGA GAcatGcGAC AGACcGTTGc CGT | — | U81803 |
| S. cerevisiae^{a} | CGCTgTCAGA GAcatGaGAC AAACTGTcGc TGT | 665 | X00779 |
| O. volvulus^{a} | TGCTgTGcGt GAtatGaGAC AAACaGTTGc GGT | — | M64333 |
| Human^{a} | TGCTgTTcGt GAtatGaGAC AGACaGTTGc TGT | — | X03558 |
| G. maxB1^{b} | TGCTATTAGA GAAGGAGGCA AAACTGTTGG AGC | — | Y15107 |
| G. maxB2^{b} | TGCTATTAGA GAAGGAGGCA AAACTGTTGG AGC | — | Y15108 |
| E. coli^{c} | CGCaATCcGt GAAGGGGCC GTACcGTTGG CGC | 78 | — |
| S. aureofaciens^{c} | CGCcATCcGt GAGGGTGGTC GTACcGTgGG CGC | — | AF007125 |
| E. tenella^{b} | TGCTATAAGAGAAGGAGGAA AAACTATAGG AGC | — | AI755521 |
| T. gondii^{b} | TGCTATTAGA GAAGGAGGTC GTACTATAGG AGC | — | Y11431 |
| S. cerevisiae^{b} | CAATATCAGA GAGGGTGGAA GAACTGTTGG TAC | 619 | K00428 |
| A. thaliana^{b} | TGCctTAAGG GAAGGAGGTA GAACaGTTGG AGC | — | X89227 |
| Selected | | 664 | |
| sequence | | | |
| for | | | |
| universal | | | |
| primer | | | |
| Selected | TATIAGR GARGGIGGIM RIACTRTWGG^{d} | 652 | |
| sequences | ATCCGT GAGGGYGGCC GITCIGT^{d} | 561 | |
| for | | | |
| universal | | | |
| primers | | | |

The sequence numbering refers to the Saccharomyces cerevisiae tuf (M) gene (SEQ ID NO. 619).
Nucleotides in capitals are identical to the selected sequences or match those sequences.
Mismatches for SEQ ID NOs. 652 and 664 are indicated by lower-case letters.
Mismatches for SEQ ID NO. 561 are indicated by underlined nucleotides.
Dots indicate gaps in the sequences displayed.
“R” “Y” “M” “K” “W” and “S” designate nucleotide positions which are degenerated.
“R” stands for A or G; “Y” stands for C or T;
“M” stands for A or C; “K” stands for G or T;
“W” stands for A or T; “S” stands for C or G.
“I” stands for inosine which is a nucleotide analog that can bind to any of the four nucleotides A, C, G or T.
^{a}This sequence refers to tuf(EF-1) gene.
^{b}This sequence refers to tuf (M) or organelle gene.
^{c}This sequence refers to tuf gene from bacteria.
^{d}These sequences are the reverse-complement of the selected primers.

Annex VII: Strategy for the selection of eukaryotic sequencing primers from tuf
(EF-1) sequences.

| | | SEQ | |
|---|---|---|---|
| | | ID | Accession |
| | 154 179 286 314 | NO.: | #: |
| S. cerevisiae | GG TTCTTTCAAG TACGCTTGGG TTTT...AGAGA TTTCATCAAG AACATGATTA CTGG... | 665 | X00779 |
| B. hominis | GG CTCCTTCAAG TACGCGTGGG TGCT...CGTGA CTTCATaAAG AACATGATCA CGGG... | — | D64080 |
| C. albicans | GG TTCTTTCAAA TACGCTTGGG TCTT...AGAGA TTTCATCAAG AATATGATCA CTGG... | — | M29934 |
| C. neoformans | TC TTCTTTCAAG TACGCTTGGG TTCT...CGAGA CTTCATCAAG AACATGATCA CCGG... | — | U81803 |
| E. histolytica | GG ATCATTCAAA TATGCTTGGG TCTT...AGAGA TTTCATTAAG AACATGATTA CTGG... | — | M92073 |
| G. lamblia | GG CTCCTTCAAG TACGCGTGGG TCCT...CGCGA CTTCATCAAG AACATGATCA CGGG... | — | D14342 |
| H. capsulatum | AA ATCCTTCAAA TATGCGTGGG TCCT...CGTGA CTTCATCAAG AACATGATCA CTGG... | — | U14100 |
| Human | GG CTCCTTCAAG TATGCCTGGG TCTT...AGAGA CTTtATCAAA AACATGATTA CAGG... | — | X03558 |
| L. braziliensis | GC GTCCTTCAAG TACGCGTGGG TGCT...CGCGA CTTCATCAAG AACATGATCA CCGG... | — | U72244 |
| O. volvulus | GG CTCATTTAAA TATGCTTGGG TATT...CGTGA TTTCATTAAG AATATGATCA CAGG... | — | M64333 |
| P. berghei | GG TagTTTCAAA TATGCATGGG TTTT...AAAcA TTTtATTAAA AATATGATTA CTGG... | — | AJ224150 |
| P. knowlesi | GG AagTTTTAAG TACGCATGGG TGTT...AAGGA TTTCATTAAA AATATGATTA CCGG... | — | AJ224153 |
| S. pombe | GG TTCCTTCAAG TACGCCTGGG TTTT...CGTGA TTTCATCAAG AACATGATTA CCGG... | — | U42189 |
| T. cruzi | TC TTCTTTCAAG TACGCGTGGG TCTT...CGCGA CTTCATCAAG AACATGATCA CGGG... | — | L76077 |
| Y. lipolytica | GG TTCTTTCAAG TACGCTTGGG TTCT...CGAGA TTTCATCAAG AACATGATCA CCGG... | — | AF054510 |
| Selected sequences for | TCITTYAAR TAYGCITGGG T | 558 | |
| amplification primers | | | |
| | GA YTTCATYAAR AAYATGATYA C | 560 | |
| | GA YTTCATIAAR AAYATGAT | 653 | |

The sequence numbering refers to the Saccharomyces cerevisiae tuf (EF-1) gene fragment
(SEQ ID NO. 665).
Nucleotides in capitals are identical to the selected sequences SEQ ID NOs. 558, 560 or 653,
or match those sequences.
Mismatches for SEQ ID no. 558 and 560 are indicated by lower-case letters.
Mismatches for SEQ ID NO. 653 are indicated by underlined nucleotides.
Dots indicate gaps in the sequences displayed.
“R” “Y” “M” “K” “W” and “S” designate nucleotide
positions which are degenerated.
“R” stands for A or G;
“Y” stands for C. or T;
“M” stands for A or C;
“K” stands for G or T;
“W” stands for A or T;
“S” stands for C or G.
“I” stands for inosine which is a nucleotide analog that can bind to any of the
four nucleotides A, C, G or T.

| | | SEQ | |
|---|---|---|---|
| | | ID | Accession |
| | 751 776 1276 1304 | NO.: | #: |
| S. cerevisiae | ...GTTTACAA GATCGGTGGT ATTGGTAC...GACATG AGACAAACTG TCGCTGTCGG TGT | 665 | X00779 |
| B. hominis | ...GTGTACAA GATTGGCGGT ATTGGTAC...GATATG AGACAGACTG TCGCTGTCGG TAT | — | D64080 |
| C. albicans | ...GTTTACAA GATCGGTGGT ATTGGTAC...GATATG AGACAAACCG TTGCTGTtGG TGT | — | M29934 |
| C. neoformans | ...GTCTACAA GATCGGTGGT ATCGGCAC...GACATG CGACAGACCG TTGCCGTtGG TGT | — | U81803 |
| E. histolytica | ...GTTTACAA GATTTcAGGT ATTGGAAC...GATATG AaACAAACCG TTGCTGTtGG AGT | — | M92073 |
| G. lamblia | ...GTCTACAA GATCTcGGGc gTCGGGAC...~~~~~~ ~~~~~~~~~~ ~~~~~~~~~~ ~~~ | — | D14342 |
| H. capsulatum | ...GTGTACAA AATCTcTGGT ATTGGCAC...GACATG AGACAAACCG TCGCTGTCGG TGT | — | U14100 |
| Human | ...GTCTACAA AATTGGTGGT ATTGGTAC...GATATG AGACAGACAG TTGCgGTgGG TGT | — | X03558 |
| L. braziliensis | ...GTGTACAA GATCGGCGGT ATCGGCAC...GACATG CGCagAACGG TCGCCGTCGG CAT | — | U72244 |
| O. volvulus | ...GTTTACAA AATTGGAGGT ATTGGAAC...GATATG AGACAAACAG TTGCTGTtGG CGT | — | M64333 |
| P. berghei | ...GTATACAA AATTGGTGGT ATTGGTAC...GATATG AGACAAACAA TTGCTGTCGG TAT | — | AJ224150 |
| P. knowlesi | ...GTATACAA AATCGGTGGT ATTGGTAC...GATATG AGACAAACCA TTGCTGTCGG TAT | — | AJ224153 |
| S. pombe | ...GTTTACAA GATCGGTGGT ATTGGTAC...GACATG CGTCAAACCG TCGCTGTCGG TGT | — | U42189 |
| T. cruzi | ...GTGTACAA GATCGGCGGT ATCGGCAC...GACATG CGCCAGACGG TCGCCGTCGG CAT | — | L76077 |
| Y. lipolytica | ...GTCTACAA GATCGGTGGT ATCGGCAC...GACATG CGACAGACCG TTGCTGTCGG TGT | — | AF054510 |
| Selected sequence for | TACAA RATYKGIGGT ATYGG | 654 | |
| amplification primer | | | |
| Selected sequences for | TACAA RATYKGIGGT ATYGG | 655 | |
| amplification primers^{a} | ATG MGICARACIR TYGCYGTCGG | 559 | |

The sequence numbering refers to the Saccharomyces cerevisiae tuf (EF-1) gene fragment
(SEQ ID NO. 665).
Nucleotides in capitals are identical to the selected sequences or match those sequences.
Mismatches are indicated by lower-case letters.
“~” indicate incomplete sequence data.
Dots indicate gaps in the sequences displayed.
“R” “Y” “M” “K” “W” and “S” designate
nucleotide positions which are degenerated.
“R” stands for A or G;
“Y” stands for C or T;
“M” stands for A or C;
“K” stands for G or T;
“W” stands for A or T;
“S” stands for C or G.
“I” stands for inosine which is a nucleotide analog that can bind to any of the
four nucleotides A, C, G or T.
^{a}This sequences are the reverse-complement of the selected primers.

Annex VIII: Strategy for the selection of Streptococcus agalactiae-specific
amplification primers from tuf sequences.

| | | SEQ | Accession |
|---|---|---|---|
| | 305 334 517 542 | ID NO.: | #: |
| S. agalactiae | CCAGAA CGTGATACTG ACAAACCTTT ACTT...GGAC AACGTTGGTG TTCTTCTTCG TG | 207 | — |
| S. agalactiae | CCAGAA CGTGATACTG ACAAACCTTT ACTT...GGAC AACGTTGGTG TTCTTCTTCG TG | 208 | — |
| S. agalactiae | CCAGAA CGTGATACTG ACAAACCTTT ACTT...GGAC AACGTTGGTG TTCTTCTTCG TG | 209 | — |
| S. agalactiae | CCAGAA CGTGATACTG ACAAACCTTT ACTT...GGAC AACGTTGGTG TTCTTCTTCG TG | 210 | — |
| S. anginosus | CCAGAA CGTGAcACTG ACAAACCaTT gCTT...AGAt AACGTaGGgG TTCTTCTTCG TG | 211 | — |
| S. anginosus | CCAGAA CGTGATACTG ACAAACCaTT gCTT...AGAt AACGTaGGTG TTCTTCTTCG TG | 221 | — |
| S. bovis | CCAaAA CGTGATACTG ACAAACCaTT gCTT...GGAt AACGTTGGTG TTCTTCTTCG TG | 212 | — |
| S. gordonii | CCAGAA CGTGAcACTG ACAAACCaTT gCTT...AGAt AAtGTaGGTG TcCTTCTTCG TG | 223 | — |
| S. mutans | CCAGAA CGTGATACTG ACAAgCCgcT cCTT...GGAt AAtGTTGGTG TTCTcCTTCG TG | 224 | — |
| S. pneumoniae | CCAGAA CGTGAcACTG ACAAACCaTT gCTT...AGAt AACGTaGGTG TcCTTCTTCG TG | 145^{a} | |
| S. sanguinis | CCAGAA CGcGATACTG ACAAgCCaTT gCTT...GGAC AACGTaGGTG TgCTTCTcCG TG | 227 | — |
| S. sobrinus | CCAaAA CGcGATACTG AtAAgCCaTT gCTT...AGAt AACGTTGGTG TgCTTCTTCG TG | 228 | — |
| B. cepacia | CCGGAg CGTGcagtTG ACggcgCgTT cCTG...CGAC AACGTTGGTa TcCTgCTgCG cG | 16 | — |
| B. fragilis | CCTccg CGcGATgtTG AtAAACCTTT ctTG...TGAC AACGTaGGTc TgtTgCTTCG TG | — | P33165 |
| B. subtilis | CCAGAA CGcGAcACTG AaAAACCaTT caTG...TGAC AACaTTGGTG ccCTTCTTCG cG | — | Z99104 |
| C. diphtheriae | CCAGAg CGTGAgACcG ACAAgCCaTT cCTC...CGAC AACtgTGGTc TgCTTCTcCG TG | 662 | — |
| C. trachomatis | CCAGAA aGaGAaAtTG ACAAgCCTTT cTTA...AGAg AAtGTTGGat TgCTcCTcaG aG | 22 | — |
| E. coli | CCAGAg CGTGcgAtTG ACAAgCCgTT cCTg...TGAg AACGTaGGTG TTCTgCTgCG TG | 78 | — |
| G. vaginalis | CCAact CacGATctTG ACAAgCCaTT cTTg...CGAt RACacTGGTc TTCTTCTcCG cG | 135^{a} | |
| S. aureus | CCAGAA CGTGATtCTG ACAAACCaTT cATg...TGAC AACaTTGGTG catTatTaCG TG | 179 | — |
| Selected sequence for | GAA CGTGATACTG ACAAACCTTT A | 549 | |
| species-specific | | | |
| primer | | | |
| Selected sequence for | C AACGTTGGTG TTCTTCTTC | 550 | |
| species-specific | | | |
| primer^{b} | | | |

The sequence numbering refers to the Streptococcus agalactiae tuf gene fragment (SEQ ID NO. 209).
Nucleotides in capitals are identical to the selected sequences or match those sequences.
Mismatches are indicated by lower-case letters.
Dots indicate gaps in the sequences displayed.
“R” “Y” “M” “K” “W” and “S” designate nucleotide positions which are degenerated.
“R” stands for A or G;
“Y” stands for C or T;
“M” stands for A or C;
“K” stands for G or T;
“W” stands for A or T;
“S” stands for C or G.
“I” stands for inosine which is a nucleotide analog that can bind to any of the four nucleotides A, C, G or T.
^{a}The SEQ ID NO. refers to previous patent publication WO98/20157.
^{b}This sequence is the reverse-complement of the selected primer.

Annex IX: Strategy for the selection of Streptococcus agalactiae-specific
hybridization probes from tuf sequences.

| | | SEQ | |
|---|---|---|---|
| | | ID | Accession |
| | 401 431 433 470 | NO.: | #: |
| S. | GGTACTGT TaaaGTtAAt GACGAAGTTG AAATCGTTGG TATcAAAGAc GAaATCtctA AAGCAGTTGT TA | 206 | |
| acidominimus | | | |
| S. agalactiae | GGTACTGT TCGTGTCAAC GACGAAGTTG AAATCGTTGG TATTAAAGAA GATATCCAAA AAGCAGTTGT TA | 209 | |
| S. agalactiae | GGTACTGT TCGTGTCAAC GACGAAGTTG AAATCGTTGG TATTAAAGAA GATATCCAAA AAGCAGTTGT TA | 144^{a} | |
| S. agalactiae | GGTACTGT TCGTGTCAAC GACGAAGTTG AAATCGTTGG TATTAAAGAA GATATCCAAA AAGCAGTTGT TA | 207 | |
| S. agalactiae | GGTACTGT TCGTGTCAAC GACGAAGTTG AAATCGTTGG TATTAAAGAA GATATCCAAA AAGCAGTTGT TA | 210 | |
| S. agalactiae | GGTACTGT TCGTGTCAAC GACGAAGTTG AAATCGTTGG TATTAAAGAA GATATCCAAA AAGCAGTTGT TA | 208 | |
| S. anginosus | GGTACTGT TaaaGTCAAC GACGAAGTTG AAATCGTTGG TATccgtGAt GAaATCCAAA AAGCAGTTGT TA | 211 | |
| S. anginosus | GGTACTGT TaaaGTCAAC GAtGAAGTTG AAATCGTTGG TATccgcGAg GAaATCCAAA AAGCAGTTGT TA | 221 | |
| S. bovis | GGTACTGT TaaaGTCAAC GACGAAGTTG AAATCGTTGG TATccgtGAc GAcATCCAAA AAGCtGTTGT TA | 212 | |
| S. anginosus | GGTACTGT TaaaGTCAAt GAtGAAGTTG AAATCGTTGG TATTcgtGAc GAaATCCAAA AAGCAGTTGT TA | 213 | |
| S. cricetus | GGTACTGT TaagGTCAAt GACGAAGTTG AAATCGTTGG TATcAAgGAc GAaATCCAAA AAGCgGTTGT TA | 214 | |
| S. cristatus | GGTACTGT TCGTGTCAAC GAtGAAaTcG AAATCGTTGG TATcAAAGAA GAaATCCAAA AAGCAGTTGT TA | 215 | |
| S. downei | GGTACTGT TaagGTCAAC GACGAAGTTG AAATCGTTGG TATcAAgGAc GAaATCCAAA AAGCAGTTGT TA | 216 | |
| S. | GGTACTGT TCGTGTCAAC GACGAAaTcG AAATCGTTGG TATcAAAGAA GAaActaAAA AAGCtGTTGT TA | 217 | |
| dysgalactiae | | | |
| S. equi equi | GGTACTGT TCGTGTCAAC GACGAAaTcG AAATCGTTGG TATcAgAGAc GAgATCaAAA AAGCAGTTGT TA | 218 | |
| S. ferus | GGTACTGT aaGaGTCAAC GAtGAAGTTG AAATCGTTGG TATcAAAGAc GAaATCactA AAGCAGTTGT TA | 219 | |
| S. gordonii | GGTAtcGT TaaaGTCAAt GACGAAaTcG AAATCGTTGG TATcAAAGAA GAaATCCAAA AAGCAGTTGT TA | 220 | |
| S. macacae | GGTACTGT TaagGTtAAt GAtGAAGTTG AAATCGTTGG TATTcgtGAc GATATtCAAA AAGCAGTTGT TA | 222 | |
| S. gordonii | GGTAtcGT TaaaGTCAAC GACGAAaTcG AAATCGTTGG TATcAAAGAA GAaActCAAA AAGCAGTTGT TA | 223 | |
| S. mutans | GGTACTGT TaaaGTtAAC GAtGAAGTTG AAATCGTTGG TATccgtGAt GAcATtCAAA AAGCtGTTGT TA | 224 | |
| S. oralis | GGTACTGT TCGTGTCAAC GACGAAaTcG AAATCGTTGG TATcAAAGAA GAaActCAAA AAGCAGTTGT TA | — | P33170 |
| S. | GGTgtTGT TCGTGTCAAt GAtGAAaTcG AAATCGTTGG TATcAAAGAA GAaATCCAAA AAGCAGTTGT TA | 225 | |
| parasanguinis | | | |
| S. pneumoniae | GGTAtcGT TaaaGTCAAC GACGAAaTcG AAATCGTTGG TATcAAAGAA GAaActCAAA AAGCAGTTGT TA | 145^{a} | |
| S. pyogenes | GGTACTGT TCGTGTCAAC GACGAAaTcG AAATCGTTGG TATcAAAGAA GAaActaAAA AAGCtGTTGT TA | — | Genome |
| | | | project |
| S. ratti | GGTACTGT TaaaGTCAAt GACGAAGTTG AAATCGTTGG TATccgtGAt GAcATCCAAA AAGCtGTTGT TA | 226 | |
| S. salivarius | GGTgtTGT TCGTGTCAAt GACGAAGTTG AAATCGTTGG TcTTAAAGAA GAcATCCAAA AAGCAGTTGT TA | 146^{a} | |
| S. sanguinis | GGTAtcGT TaaaGTCAAC GACGAAaTcG AAATCGTTGG TATcAAAGAA GAaATCCAAA AAGCAGTTGT TA | 227 | |
| S. sobrinus | GGTACTGT TaagGTCAAC GACGAAGTTG AAATCGTTGG TATccgtGAc GATATCCAAA AAGCAGTTGT TA | 228 | |
| S. suis | GGTACTGT TCGTGTCAAC GACGAAaTcG AAATCGTTGG TcTTcAAGAA GAaAaatcta AAGCAGTTGT TA | 229 | |
| S. uberis | GGTACTGT TCGTGTCAAC GACGAAaTTG AAATCGTTGG TATcAAAGAA GAaActaAAA AAGCAGTTGT TA | 230 | |
| S. | GGTgtTGT TCGTGTtAAt GACGAAGTTG AAATCGTTGG TcTTAAAGAA GAaATCCAAA AAGCAGTTGT TA | 231 | |
| vestibularis | | | |
| Selected sequences for | ACTGT TCGTGTCAAC GACGAAGTTG AAA | 582 | |
| species-specific hybridization | CGTTGG TATTAAAGAA GATATCCAAA AAAGTTG | 583 | |
| probes^{b} | | | |

The sequence numbering refers to the Streptococcus agalactiae tuf gene fragment (SEQ ID NO. 209).
Nucleotides in capitals are identical to the selected sequences or match those sequences.
Mismatches are indicated by lower-case letters.
Dots indicate gaps in the sequences displayed.
^{a}The SEQ ID NO. refers to previous patent publication WO98/20157.
^{b}These sequences are the reverse-complement of the selected probes.

| Annex X: Strategy for the selection of Streptococcus agalactiae-specific | | |
|---|---|---|
| amplification primers from atpD sequences. | | |
| | | SEQ ID |
| | 39 80 203 234 368 399 | NO.: |
| S. agalactiae | TT GATTGTCTAT AAAAATGGCG ATAAGTCACA AAAAGTAGTA...TAAGGATA CTTTGGGTCG TGTCTTCAAC GTTC...CTT ATTAGCACCT TACTTAAAAG GTGGTAAAG | 380 |
| S. agalactiae | TT GATTGTCTAT AAAAATGGCG ATAAGTCACA AAAAGTAGTA...TAAGGATA CTTTGGGTCG TGTCTTCAAC GTTC...CTT ATTAGCACCT TACTTAAAAG GTGGTAAAG | 379 |
| S. agalactiae | TT GATTGTCTAT AAAAATGGCG ATAAGTCACA AAAAGTAGTA...TAAGGATA CTTTGGGTCG TGTCTTCAAC GTTC...CTT ATTAGCACCT TACTTAAAAG GTGGTAAAG | 381 |
| S. agalactiae | TT GATTGTCTAT AAAAATGGCG ATAAGTCACA AAAAGTAGTA...TAAGGATA CTTTGGGTCG TGTCTTCAAC GTTC...CTT ATTAGCACCT TACTTAAAAG GTGGTAAAG | 382 |
| S. agalactiae | TT GATTGTCTAT AAAAATGGCG ATAAGTCACA AAAAGTAGTA...TAAGGATA CTTTGGGTCG TGTCTTCAAC GTTC...CTT ATTAGCACCT TACTTAAAAG GTGGTAAAG | 383 |
| S. bovis | TT GATTGTtTAT AAAgATGGCG ATAAGTCtCA AAAAaTcGTg...TAAaGAaA CTTTGGGTCG TGTgTTtAAt GTTC...CcT tcTtGCcCCT TACcTAAAAG GTGGTAAAG | —^{a} |
| S. salivarius | TT GgTcGTtTAT ActgATGaac AaAAGTCtaA AcgtaTcGTg...TAAaGATA CccTtGGaCG TGTCTTtAAC GTTC...CTT gcTAGCcCCT TACcTtAAgG GTGGTAAAG | 387 |
| S. pneumoniae | cT tgTcGTCTAc AAAAATGaCG AaAgaaaAac AAAAaTcGTc...TAAaGAaA CTTTGGGaCG TGTCTTCAAC GTTt...CcT tcTtGCcCCT TACcTtAAAG GTGGTAAAG | —^{b} |
| S. pyogenes | TT GATTGTtTAT AAAgATaGtG ATAAaaagCA AAAAaTcGTc...TAAaGAaA CTTTGGGaCG cGTCTTtAAt GTaC...CcT tcTtGCcCCT TACcTtAAAG GTGGTAAAG | —^{c} |
| S. anginosus | cT tgTaGTCTAT AAAAATGaCG AaAAtaaAtc AAAAaTcGTc...gAAaGAaA CacTtGGTCG cGTCTTtAAC GTTt...CcT tTTAGCcCCc TACcTcAAAG GTGGgAAAG | 386 |
| S. sanguinis | cT tgTaGTCTAT AAAAATGatG AgAAaaaAtc AAAAaTcGTc...aAAGGAaA CTcTaGGcCG gGT gTTCAAt GTTt...CcT gcTAGCACCT TAtcTgAAAG GTGGgAAAG | —^{d} |
| S. mutans | TT GgTcGTtTAT AAAgATGGCG AcAAGTCtCA AAgAaTtGTt...aAAaGAaA CacTaGGTCG TGTCTTtAAt GTTC...CcT tcTtGCcCCT TAtcTtAAAG GTGGTAAAG | —^{e} |
| B. anthracis | gT aAaacagagc AAcgAaaaCG gaAcaagcat tAActTAacA...TgAtGcaA CacTtGGTCG TGTaTTtAAC GTat...CTT AcTtGCtCCT TACaTtAAgG GTGGTAAga | 247 |
| B. cereus | gT aAaacaaagc AAcgAaaaCG g...aagcat gAActTAacA...TgAtGcaA CacTtGGaCG TGTaTTCAAC GTat...CTT AcTtGCtCCT TACaTtAAgG GTGGTAAga | 248 |
| E. faecium | TT agTTGTtTAT AAAAATGaCG AaAAtaaAtc AAAAGTtGTt...TAAaGAaA CaTTaGGTCG cGTaTTCAAC GTaC...tTT gcTtGCcCCa TAtTTAAAAG GTGGgAAAG | 292 |
| E. gallinarum | TT GATcGTtTAc AAAAAaGaCG AgAAaaaAac AAAAGTAGTA...aAcaGATA CTcTaGGcCG aGTaTTtAAt GTaC...tTT ATTAGCtCCT TACTTAAAAG GTGGTAAAG | 293 |
| E. faecalis | TT agTcGTtTAT AAAAATGGCG AagcaaaACA AAAAGTAGTA...TAAaGATA CaTTaGGTCG TGTgTTtAAC GTTt...CTT ATTAGCACCT TAtcTAAAAG GTGGTAAAG | 291 |
| E. coli | Ta cgaTGctctT gAggtgcaaa ATggtaatgA gcgtcTgGTg...TAAaGcgA CTcTGGGcCG TaTCaTgAAC GTaC...CcT gaTgtgtCCg TtCgctAAgG GcGGTAAAG | —^{f} |
| L. monocytogenes | Ta tAaatctgAT gcAgAaGaaG caccaaCtag ccAAcTtact...TAcaGtaA CTcTtGGTCG TGTaTTtAAt GTat...CTT gcTAGCtCCT TACTTAAAAG GTGGTAAAa | 324 |
| S. aureus | gT tATTGatgtg cctAAaGaaG AaggtaCAat AcAAcTAacA...TgAtGAaA CaTTaGGTCG TGTaTTtAAt GTaC...tTT AcTAGCACCT TAtaTtAAAG GTGGTAAAa | 366 |
| S. epidermidis | ca cATcGaagtT cctAAaGaaG ATggagCgCt tcAAtTAacA...TgAcGtaA CTcTaGGaaG aGTgTTtAAC GTaC...CTT ATTAGCACCT TACaTAAAAG GTGGTAAAa | 370 |
| Selected sequences | ATTGTCTAT AAAAATGGCG ATAAGTC | 627 |
| for species- | AAAATGGCG ATAAGTCACA AAAAGTA | 628 |
| specific primer | | |
| Selected sequences | GGATA CTTTGGGTCG TGTCTTCAAC G | 625 |
| for species- | ATTAGCACCT TACTTAAAAG GTGGTA | 626 |
| specific primers^{g} | | |

The sequence numbering refers to the Streptococcus agalactiae tuf gene fragment (SEQ ID NO. 380). Nucleotides in capitals are identical to the selected sequences or match those sequences. Mismatches are indicated by lower-case letters. Dots indicate gaps in the sequences displayed.
^{a,d,e,f}These sequences were obtained from Genbank and have accession #: a = AB009314, d = AF001955, e = U31170, and f = V00311.
^{b,c}These sequences were obtained from genome sequencing projects,
^{g}These sequences are the reverse-complement of the selected primers.

| Annex XI: Strategy for the selection of Candida albicans/dubliniensis-specific | | | |
|---|---|---|---|
| amplification primers, Candida albicans-specific hybridization probe | | | |
| and Candida dubliniensis-specific hybridization probe from tuf | | | |
| sequences. | | | |
| | | SEQ | |
| | 337 368 403 428 460 491 | ID NO.: | Accession #: |
| C. albicans | CGTC AAGAAGGTTG GTTACAACCC AAAGACTG...CAACATGA TTGAACCATC CACCAACT...C AAATCCGGTA AAGTTACTGG TAAGACCTTG T | 624 | — |
| C. albicans | CGTC AAGAAGGTTG GTTACAACCC AAAGACTG...CAACATGA TTGAACCATC CACCAACT...C AAATCCGGTA AAGTTACTGG TAAGACCTTG T | 409 | — |
| C. albicans | CGTC AAGAAGGTTG GTTACAACCC AAAGACTG...CAACATGA TTGAACCATC CACCAACT...C AAATCCGGTA AAGTTACTGG TAAGACCTTG T | 410 | — |
| C. albicans | CGTC AAGAAGGTTG GTTACAACCC AAAGACTG...CAACATGA TTGAACCATC CACCAACT...C AAATCCGGTA AAGTTACTGG TAAGACCTTG T | 407 | — |
| C. albicans | CGTC AAGAAGGTTG GTTACAACCC AAAGACTG...CAACATGA TTGAACCATC CACCAACT...C AAATCCGGTA AAGTTACTGG TAAGACCTTG T | 408 | — |
| C. dubliniensis | CGTC AAGAAGGTTG GTTACAACCC AAAGACTG...CAACATGA TTGAAgCtTC CACCAACT...C AAATCCGGTA AgGTTACTGG TAAGACCTTG T | 412 | — |
| C. dubliniensis | CGTC AAGAAGGTTG GTTACAACCC AAAGACTG...CAACATGA TTGAAgCtTC CACCAACT...C AAATCCGGTA AgGTTACTGG TAAGACCTTG T | 414 | — |
| C. dubliniensis | CGTC AAGAAGGTTG GTTACAACCC AAAGACTG...CAACATGA TTGAAgCtTC CACCAACT...C AAATCCGGTA AgGTTACTGG TAAGACCTTG T | 415 | — |
| C. glabrata | CATC AAGAAGGTcG GTTACAACCC AAAGACTG...CAACATGA TTGAAgCcaC CACCAACG...C AAggCtGGTg tcGTcAagGG TAAGACCTTG T | 417 | — |
| C. guilliermondii | CGTC AAGAAGGTTG GTTACAACCC tAAGACTG...CAACATGA TTGAggCtTC tACCAACT...C AAggCtGGTA AgtccACcGG TAAGACtTTG T | 418 | — |
| C. kefyr | CATC AAGAAGGTcG GTTACAACCC AAAGAATG...CAACATGA TTGAAgCcaC CACCAACG...C AAggCtGGTA ccGTcAagGG TAAGACCTTG T | 421 | — |
| C. krusei | CATC AAGAAGGTTG GTTACAACCC AAAGACTG...CAACATGA TTGAAgCATC CACCAACT...C AAggCaGGTg ttGTTAagGG TAAGACCTTA T | 422 | — |
| C. lusitaniae | CGTC AAGAAGGTTG GTTACAACCC tAAGACTG...CAACATGA TTGAgCCATC YACCAACT...C AAgTCYGGTA AgtccACcGG TAAGACCTTG T | 424 | — |
| C. neoformans | CATC AAGAAGGTTG GTTACAACCC cAAGgCTG...CAACATGt TgGAggagaC CACCAAGT...C AAgTCtGGTg tttccAagGG TAAGACCcTC C | 623 | — |
| C. parapsilosis | CGTC AAGAAGGTTG GTTACAACCC tAAagCTG...CAAtATGA TTGAACCATC aACCAACT...T AAAgCtGGTA AgGTTACcGG TAAGACCTTG T | 426 | — |
| C. tropicalis | CGTC AAGAAGGTTG GTTACAACCC tAAGgCTG...CAACATGA TTGAAgCtTC tACCAACT...C AAggCtGGTA AgGTTACcGG TAAGACtTTG T | 429 | — |
| A. fumigatus | CATC AAGAAGGTcG GcTACAACCC cAAGgCCG...CAACATGc TTGAgCCcTC CtCCAACT...C AAggCCGGcA AgGTcACTGG TAAGACCcTC A | 404 | — |
| Human | CATt AAGAAaaTTG GcTACAACCC cgAcACAG...CAACATGc TgGAgCCAag tgCtAACA...T AAggatGGcA AtGccAgTGG aAccACgcTG C | — | X03558 |
| P. anomala | TATC AAGAAaGTTG GTTACAACCC AAAaACTG...TAACATGA TTGAACCATC aWCtAACT...C AAAgCtGGTg AAGcTAaaGG TAAaACtTTA T | 447 | — |
| S. cerevisiae | TATC AAGAAGGTTG GTTACAACCC AAAGACTG...CAACATGA TTGAAgCtaC CACCAACG...C AAggCCGGTg tcGTcAagGG TAAGACtTTG T | 622 | — |
| S. pombe | CATC AAGAAGGTcG GTTtCAACCC cAAGACCG...TAACATGA TTGAgCCcaC CACCAACA...C AAggCtGGTg tcGTcAagGG TAAGACtcTT T | — | U42189 |
| Selected sequence | C AAGAAGGTTG GTTACAACCC AAAGA | | |
| for species-specific | | | |
| amplification | | | |
| primer^{a} | | | |
| Selected sequence | ATCCGGTA AAGTTACTGG TAAGACCT | | |
| for species-specific | | | |
| amplification | | | |
| primer^{a,b} | | | |
| Selected sequences | CATGA TTGAACCATC CACCA (C. albicans) | 577 | |
| for species-specific | CATGA TTGAAGCTTC CACCA (C. dubliniensis) | 578 | |
| hybridization probes | | | |

The sequence numbering refers to the Candida albicans tuf gene fragment (SEQ ID NO. 408). Nucleotides in capitals are identical to the selected sequences or match those sequences. Mismatches for SEQ ID NO. 577 are indicated by lower-case letters. Mismatches for SEQ ID NO. 578 are indicated by underlined nucleotides.
Dots indicate gaps in the sequerices displayed.
“R” “Y” “M” “K” “W” and “S” designate nucleotide positions which are degenerated.
“R” stands for A or G;
“Y” stands for C or T;
“M” stands for A or C;
“K” stands for G or T;
“W” stands for A or T;
“S” stands for C or G.
“I” stands for inosine which is a nucleotide analog that can bind to any of the four nucleotides A, C, G or T.
^{a}C. albicans primers have been described in a previous patent (publication WO98/20157, SEQ ID NOs. 11-12)
^{b}This sequence is the reverse-complement of the selected primer.

Annex XII: Strategy for the selection of Staphylococcus-specific amplification
primers from tuf sequences.

| | | SEQ | |
|---|---|---|---|
| | | ID | Accession |
| | 310 340 652 682 | NO.: | #: |
| S. aureus | A CAGGCCGTGT TGAACGTGGT CAAATCAAAG...CACTTACCA GAAGGTACTG AAATGGTAAT GC | 179 | — |
| S. aureus | A CAGGCCGTGT TGAACGTGGT CAAATCAAAG...CACTTACC~ ~~~~~~~~~~ ~~~~~~~~~~ GC | 176 | — |
| S. aureus | A CAGGCCGTGT TGAACGTGGT CAAATCAAAG...CACTTACCA GAAGGTMCTG AAATGGTAAT GC | 177 | — |
| S. aureus aureus | A CAGGCCGTGT TGAACGTGGT CAAATCAAAG...CACTTACCA GAAGGTACTG AAATGGTAAT GC | 180 | — |
| S. auricularis | A CAGGCCGTGT TGAACGTGGT CAAATCAAAG...ActTTACCA GAAGGTACaG AAATGGTAAT GC | 181 | — |
| S. capitis | A CAGGCCGTGT TGAACGTGGT CAAATCAAAG...AACTTACCA GAAGGTACTG AAATGGTTAT GC | 182 | — |
| capitis | | | |
| M. caseolyticus | A CTGGaCGTGT TGAgCGTGGa CAAgTtAAAG...AACTTACCA GAAGGTACTG AAATGGTAAT GC | 183 | — |
| S. cohnii | A CAGGgCGTGT TGAACGTGGT CAAATCAAAG...ActTTACCA GAAGGTACTG AAATGGTTAT GC | 184 | |
| S. epidermidis | A CAGGCCGTGT TGAACGTGGT CAAATCAAAG...~~~~~~~~~ ~~~~~~~~~~ ~~~~~~~~~~ ~~ | 185 | — |
| S. epidermidis | A CAGGCCGTGT TGAACGTGGT CAAATCAAAG...AACTTACCA GAAGGTACaG AAATGGTTAT GC | 141^{a} | — |
| S. haemolyticus | A CAGGCCGTGT TGAACGTGGg CAAATCAAAG...AACTTACCA GAAGGTACTG AAATGGTTAT GC | 186 | — |
| S. haemolyticus | A CAGGtCGTGT TGAACGTGGT CAAATCAAAG...AACTTACCA GAAG~~~~~~ ~~~~~~~~~~ ~~ | 188 | — |
| S. haemolyticus | A CAGGCCGTGT TGAACGTGGT CAAATCAAAG...AACTTACCA GAAGGTACTG AAATGG~~~~ ~~ | 189 | — |
| S. hominis | A CAGGCCGTGT TGAACGTGGT CAAATCAAAG...AACTTACCA GAAGGTACTG AAATGGTAAT GC | 191 | — |
| hominis | | | |
| S. hominis | A CAGGCCGTGT TGAACGTGGT CAAATCAAAG...AACTTACCA GAAGGTACTG AAATGGTAAT GC | 193 | — |
| S. hominis | A CAGGCCGTGT TGAACGTGGT CAAATCAAAG...AACTTACCA GAAGG~~~~~ ~~~~~~~~~~ ~~ | 194 | — |
| S. hominis | A CAGGCCGTGT TGAACGTGGT CAAATCAAAG...AACTTACCA GAAGGTACTG AAATGGTAAT GC | 195 | — |
| S. hominis | A CAGGCCGTGT TGAACGTGGT CAAATCAAAG...AACTTACCA GAAGGTACTG AAATGGTAAT GC | 196 | — |
| S. lugdunensis | A CAGGCCGTGT TGAACGTGGT CAAATCAAAG...AACTTACCA GAAGGTACaG AAATGGTTAT GC | 197 | — |
| S. saprophyticus | A CAGGCCGTGT TGAACGTGGT CAAATCAAAG...~~~~~~~~~ ~~~~~~~~~~ ~~~~~~~~~~ ~~ | 198 | — |
| S. saprophyticus | A CAGGCCGTGT TGAACGTGGT CAAATCAAAG...AACTTACCA GAAGGTACTG AAATGGTTAT GC | 199 | — |
| S. saprophyticus | A CAGGCCGTGT TGAACGTGGT CAAATCAAAG...AACTTACCA GAAGGTACTG AAATGGTTAT GC | 200 | — |
| S. sciuri sciuri | A CAGGCCGTGT TGAACGTGGT CAAATCACTG...AACTTACCA GAAGGTACTG AAATGGTTAT GC | 201 | — |
| S. warneri | A CAGGCCGTGT TGAACGTGGT CAAATCAAAG...CAaTTACCA GAAGGTACTG ~~~~~~~~~~ ~~ | 187 | — |
| S. warneri | A CAGGCCGTGT TGAACGTGGT CAAATCAAAG...~~~~~~~~~ ~~~~~~~~~~ ~~~~~~~~~~ ~~ | 192 | — |
| S. warneri | A CAGGCCGTGT TGAACGTGGT CAAATCAAAG...CAaTTACCA GAAGGTACTG AAATGGTTAT GC | 202 | — |
| B. subtilis | A CTGGCCGTGT aGAACGcGGa CAAgTtAAAG...CAtcTtCCA GAAGGcgtaG AAATGGTTAT GC | — | Z99104 |
| E. coli | A CCGGtCGTGT aGAACGcGGT atcATCAAAG...GAacTgCCg GAAGGcgtaG AgATGGTAAT GC | 78 | — |
| L. monocytogenes | A CTGGaCGTGT TGAACGTGGa CAAgTtAAAG...AcacTtCCA GAAGGTACTG AAATGGTAAY GC | 138^{a} | — |
| Selected | GGCCGTGT TGAACGTGGT CAAATCA | 553 | |
| sequence | | | |
| for genus- | | | |
| specific primer | | | |
| Selected | TTACCA GAAGGTACTG AAATGGTIA | 575 | |
| sequences | TTACCA GAAGGTACTG AAATGCTWA | 707 | |
| for genus- | | | |
| specific | | | |
| primers^{b} | | | |

The sequence numbering refers to the Staphylococcus aureus tuf gene fragment (SEQ ID NO. 179). Nucleotides in capitals are identical to the selected sequences or match those sequences. Mismatches are indicated by lower-case letters. “~” indicate incomplete sequence data.
Dots indicate gaps in the sequences displayed.
“R” “Y” “M” “K” “W” and “S” designate nucleotide positions which are degenerated.
“R” stands for A or G;
“Y” stands for C or T;
“M” stands for A or C;
“K” stands for G or T;
“W” stands for A or T;
“S” stands for C or G.
“I” stands for inosine which is a nucleotide analog that can bind to any of the four nucleotides A, C, G or T.
^{a}The SEQ ID NO. refers to previous patent publication WO98/20157.
^{b}These sequences are the reverse-complement of the selected primers.

Annex XIII: Strategy for the selection of the
Staphylococcus-specific hybridization
probe from tuf sequences.

| | | |
|---|---|---|
| 400 425 | SEQ ID NO.: | Accession #: |

| | | | |
|---|---|---|---|
| S. aureus | G TTGAAATGTT CCGTAAATTA TTAGA | 179 | — |
| S. aureus | G TTGAAATGTT CCGTAAATTA TTAGA | 176 | — |
| S. aureus | G TTGAAATGTT CCGTAAATTA TTAGA | 177 | — |
| S. aureus | G TTGAAATGTT CCGTAAATTA TTAGA | 178 | — |
| S. aureus aureus | G TTGAAATGTT CCGTAAATTA TTAGA | 180 | — |
| S. auricularis | G TAGAAATGTT CCGTAAATTA TTAGA | 181 | — |
| S. capitis capitis | G TAGAAATGTT CCGTAAATTA TTAGA | 182 | — |
| M. caseolyticus | G TAGAAATGTT CCGTAAATTA TTAGA | 183 | — |
| S. cohnii | G TAGAAATGTT CCGTAAATTA TTAGA | 184 | — |
| S. epidermidis | G TAGAAATGTT CCGTAAATTA TTAGA | 185 | — |
| S. haemolyticus | G TAGAAATGTT CCGTAAATTA TTAGA | 186 | — |
| S. haemolyticus | G TAGAAATGTT CCGTAAATTA TTAGA | 189 | — |
| S. haemolyticus | G TAGAAATGTT CCGTAAATTA TTAGA | 190 | — |
| S. haemolyticus | G TAGAAATGTT CCGTAAATTA TTAGA | 188 | — |
| S. hominis | G TAGAAATGTT CCGTAAATTA TTAGA | 196 | — |
| S. hominis | G TAGAAATGTT CCGTAAATTA TTAGA | 194 | — |
| S. hominis hominis | G TAGAAATGTT CCGTAAATTA TTAGA | 191 | — |
| S. hominis | G TAGAAATGTT CCGTAAATTA TTAGA | 193 | — |
| S. hominis | G TAGAAATGTT CCGTAAATTA TTAGA | 195 | — |
| S. lugdunensis | G TAGAAATGTT CCGTAAATTA TTAGA | 197 | — |
| S. saprophyticus | G TAGAAATGTT CCGTAAATTA TTAGA | 198 | — |
| S. saprophyticus | G TAGAAATGTT CCGTAAATTA TTAGA | 200 | — |
| S. saprophyticus | G TAGAAATGTT CCGTAAATTA TTAGA | 199 | — |
| S. sciuri sciuri | G TTGAAATGTT CCGTAAATTA TTAGA | 201 | — |
| S. warneri | G TAGAAATGTT CCGTAAgTTA TTAGA | 187 | — |
| S. warneri | G TAGAAATGTT CCGTAAgTTA TTAGA | 192 | — |
| S. warneri | G TAGAAATGTT CCGTAAgTTA TTAGA | 202 | — |
| S. warneri | G TAGAAATGTT CCGTAAgTTA TTAGA | 203 | — |
| B. subtilis | G TTGAAATGTT CCGTAAgcTt cTTGA | — | Z99104 |
| E. coli | G TTGAAATGTT CCGcAAAcTg cTGGA | 78 | — |
| L. monocytogenes | G TAGAAATGTT CCGTAAATTA cTAGA | 138^{a} | — |
| Selected sequence for | GAAATGTT CCGTAAATTA TT | 605 | |
| genus-specific hybridization | | | |
| probe | | | |

The sequence numbering refers to the Staphylococcus aureus tuf gene fragment (SEQ ID NO. 179). Nucleotides in capitals are identical to the selected sequence or match that sequence. Mismatches are indicated by lower-case letters.
^{a}The SEQ ID NO. refers to previous patent publication WO98/20157.

Annex XIV: Strategy for the selection of
Staphylococcus saprophyticus-specific and
of Staphylococcus haemolyticus-specific
hybridization probes from tuf sequences.

| | | SEQ ID |
|---|---|---|
| | 339 383 | NO.: |
| S. aureus | AG TtGGTGAAGA AgTtGAAATC ATcGGTtTaC ATGACACaTC TAA | 179 |
| S. aureus | AG TtGGTGAAGA AgTtGAAATC ATcGGTtTaC ATGACACaTC TAA | 176 |
| S. aureus | AG TtGGTGAAGA AgTtGAAATC ATcGGTtTaC ATGACACaTC TAA | 177 |
| S. aureus | AG TtGGTGAAGA AgTtGAAATC ATcGGTtTaC ATGACACaTC TAA | 178 |
| S. aureus aureus | AG TtGGTGAAGA AgTtGAAATC ATcGGTtTaC ATGACACaTC TAA | 180 |
| S. auricularis | AG TCGGTGAAGA AgTtGAAATC ATcGGTATga AaGACggTTC AAA | 181 |
| S. capitis capitis | AG TtGGTGAAGA AgTtGAAATC ATcGGTATCC AcGAaACTTC TAA | 182 |
| M. caseolyticus | AG TtGGTGAAGA AgTtGAAATC ATTGGTtTaa cTGAagaacC AAA | 183 |
| S. cohnii | AG TCGGTGAAGA AgTtGAAATC ATcGGTATgC AaGAagaTTC CAA | 184 |
| S. epidermidis | AG TtGGTGAAGA AgTtGAAATC ATcGGTATgC AcGAaACTTC TAA | 185 |
| S. haemolyticus | AG TtGGTGAAGA AgTtGAAATC ATTGGTATCC ATGACACTTC TAA | 186 |
| S. haemolyticus | AG TtGGTGAAGA AgTtGAAATC ATTGGTATCC ATGACACTTC TAA | 189 |
| S. haemolyticus | AG TtGGTGAAGA AgTtGAAATC ATTGGTATCC ATGACACTTC TAA | 190 |
| S. haemolyticus | AG TtGGTGAAGA AgTtGAAATt ATTGGTATCa AaGAaACTTC TAA | 188 |
| S. hominis | AG TtGGTGAAGA AgTtGAAATt ATTGGTATCa AaGAaACTTC TAA | 194 |
| S. hominis hominis | AG TtGGTGAAGA AgTtGAAATt ATTGGTATCa AaGAaACTTC TAA | 191 |
| S. hominis | AG TtGGTGAAGA AgTtGAAATt ATTGGTATCa AaGAaACTTC TAA | 193 |
| S. hominis | AG TtGGTGAAGA AgTtGAAATt ATTGGTATCa AaGAaACTTC TAA | 195 |
| S. hominis | AG TtGGTGAAGA AgTtGAAATt ATTGGTATCa AaGAtACTTC TAA | 196 |
| S. lugdunensis | AG TCGGTGAAGA AgTtGAAATt ATTGGTATCC AcGAtACTaC TAA | 197 |
| S. saprophyticus | AG TCGGTGAAGA AATCGAAATC ATcGGTATgC AaGAagaaTC CAA | 198 |
| S. saprophyticus | AG TCGGTGAAGA AATCGAAATC ATcGGTATgC AaGAagaaTC CAA | 200 |
| S. saprophyticus | AG TCGGTGAAGA AATCGAAATC ATcGGTATgC AaGAagaaTC CAA | 199 |
| S. sciuri sciuri | TG TtGGTGAAGA AgTtGAAATC ATcGGTtTaa cTGAagaaTC TAA | 201 |
| S. warneri | AG TtGGTGAAGA AgTtGAAATC ATcGGTtTaC ATGACACTTC TAA | 187 |
| S. warneri | AG TtGGTGAAGA AgTtGAAATC ATcGGTtTaC ATGACACTTC TAA | 192 |
| S. warneri | AG TtGGTGAAGA AgTtGAAATC ATcGGTtTaC ATGACACTTC TAA | 202 |
| S. warneri | AG TtGGTGAAGA AgTtGAAATC ATcGGTtTaC ATGACACTTC TAA | 203 |
| B. subtilis | AG TCGGTGAcGA AgTtGAAATC ATcGGTcTtC AaGAagagag AAA | —^{a} |
| E. coli | AG TtGGTGAAGA AgTtGAAATC gTTGGTATCa AaGAgACTca GAA | 78 |
| L. monocytogenes | AG TtGGTGAcGA AgTaGAAgTt ATcGGTATCg AaGAagaaag AAA | 138^{b} |
| Selected sequences for | CGGTGAAGA AATCGAAATC A (S. saprophyticus) | 599 |
| species-specific | (S. haemolyticus) ATTGGTATCC ATGACACTTC | 594 |
| hybridization probes | | |

The sequence numbering refers to the Staphylococcus aureus tuf gene fragment (SEQ ID NO. 179). Nucleotides in capitals are identical to the selected sequences or match those sequences. Mismatches are indicated by lower-case letters.
^{a}This sequence was obtained from Genbank accession #Z99104.
^{b}The SEQ ID NO. refers to previous patent publication WO98/20157.

Annex XV: Strategy for the selection of
Staphylococcus aureus-specific and of
Staphylococcus epidermidis-specific
hybridization probes from tuf sequences.

| | |
|---|---|
| | SEQ ID |
| 521 547 592 617 | NO.: |

| | | |
|---|---|---|
| S. aureus | TACACCACA TACTGAATTC AAAGCAG...TTCTTCtCa AACTA TCGtC CACAAAT | 179 |
| S. aureus | TACACCACA TACTGAATTC AAAGCAG...TTCTTCtC~ ~~~~~~~~~~ ~~~~~~~ | 178 |
| S. aureus | TACACCACA TACTGAATTC AAAGCAG...TTCTTCtCa AACTA TCGtC CACAAAT | 176 |
| S. aureus | TACACCACA TACTGAATTC AAAGCAG...TTCTTCtCa AACTA TCGtC CACAAAT | 177 |
| S. aureus aureus | TACACCACA TACTGAATTC AAAGCAG...TTCTTCtCa AACTA TCGtC CACAAAT | 180 |
| S. auricularis | TACACCACA cACTaAATTC ActGCAG...TTCTTCtCT AACTA cCGtC CACAAAT | 181 |
| S. capitis capitis | CACACCACA cACTaAATTC AAAGCGG...TTCTTCAgT AACTA cCGCC CACAAAT | 182 |
| M. caseolyticus | TACtCCACA TACTaAATTC AAAGCTG...TTCTTCACT AACTA cCGCC CtCAGTT | 183 |
| S. cohnii | TACACCACA cACaaAcTTt AAAGCGG...TTCTTCAgT AACTA TCGCC CACAAAT | 184 |
| S. epidermidis | TACACCACA cACaaAATTC AAAGCTG...TTCTTCACT AACTA TCGCC CACAAAT | 185 |
| S. haemolyticus | CACACCtCA cACaaAATTt AAAGCAG...TTCTTCACa AACTA TCGtC CACAAAT | 186 |
| S. haemolyticus | CACACCtCA cACaaAATTt AAAGCAG...TTCTTCACa AACTA TCGtC CACAAAT | 189 |
| S. haemolyticus | CACACCtCA cACaaAATTt AAAGCAG...TTCTTCACa AACTA TCGtC CACAAAT | 190 |
| S. haemolyticus | TACACCtCA cACaaAATTC AAAGCAG...TTCTTCACT AACTA TCGtC CACAAAT | 188 |
| S. hominis | CACACCtCA cACaaAATTC AAAGCAG...TTCTTCACT AACTA TCGtC CACAAAT | 195 |
| S. hominis | TACACCtCA cACaaAATTC AAAGCAG...TTCTTCACT AACTA TCGtC CACAAAT | 196 |
| S. hominis hominis | TACACCtCA cACaaAATTC AAAGCAG...TTCTTCtCT AACTA TCGtC CACAAAT | 191 |
| S. hominis | TACACCtCA cACaaAATTC AAAGCAG...TTCTTCtCT AACTA TCGtC CACAAAT | 193 |
| S. hominis | TACACCtCA cACaaAATTC AAAGCAG...TTCTTCtCT AACTA TCGtC CACAAAT | 194 |
| S. lugdunensis | TACACCtCA cACTaAATTt AAAGCTG...TTCTTCtCa AACTA cCGCC CACAAAT | 197 |
| S. saprophyticus | TACACCACA TACaaAATTC AAAGCGG...TTCTTCACT AACTA cCGCC CACAAAT | 198 |
| S. saprophyticus | TACACCACA TACaaAATTC AAAGCGG...TTCTTCACT AACTA cCGCC CACAAAT | 199 |
| S. saprophyticus | TACACCACA TACaaAATTC AAAGCGG...TTCTTCACT AACTA cCGCC CACAAAT | 200 |
| S. sciuri sciuri | CACACCtCA cACTaAATTC AAAGCTG...TTCTTCACa AACTA cCGCC CACAAAT | 201 |
| S. warneri | TACACCACA TACaaAATTC AAAGCGG...~~~~~~~~~ ~~~~~~~~~~ ~~~~~~~ | 192 |
| S. warneri | TACACCACA TACaaAATTC AAAGCGG...TTCTTCAgT AACTA cCGCC CACAAAT | 187 |
| S. warneri | TACACCACA TACaaAATTC AAAGCGG...TTCTTCAgT AACTA cCGCC CACAAAT | 202 |
| S. warneri | TACACCACA TACaaAATTC AAAGCGG...TTCTTCAgT AACTA cCGCC CACAAAT | 203 |
| B. subtilis | CACtCCACA cAgcaAATTC AAAGCTG...TTCTTCtCT AACTA cCGtC CtCAGTT | —^{a} |
| E. coli | CAAgCCgCA cACcaAgTTC gAAtCTG...TTCTTCAaa ggCTA cCGtC CgCAGTT | 78 |
| L. monocytogenes | TACtCCACA cACTaAcTTC AAAGCTG...TTCTTCAac AACTA cCGCC CACAAAT | 138^{b} |
| Selected sequences | ACCACA TACTGAATTC AAAG (S. aureus) | 585 |
| for species-specific | (S. epidermidis) TTCACT AACTATCGCC CACA | 593 |
| hybridization | | |
| probes | | |

The sequence numbering refers to the Staphylococcus aureus tut gene fragment (SEQ ID NO. 179). Nucleotides in capitals are identical to the selected sequences or match those sequences. Mismatches are indicated by lower-case letters. “~” indicate incomplete sequence data. Dots indicate gaps in the sequences displayed.
^{a}This sequence was obtained from Genbank accession #Z99104.
^{b}The SEQ ID NO. refers to previous patent publication WO98/20157.

Annex XVI: Strategy for the selection of the
Staphylococcus hominis-specific
hybridization probe from tuf sequences.

| | |
|---|---|
| 358 383 | SEQ ID NO.: |

| | | |
|---|---|---|
| S. aureus | ATC ATcGGTtTac AtGAcACaTC TAA | 179 |
| S. aureus | ATC ATcGGTtTac AtGAcACaTC TAA | 176 |
| S. aureus | ATC ATcGGTtTac AtGAcACaTC TAA | 177 |
| S. aureus | ATC ATcGGTtTac AtGAcACaTC TAA | 178 |
| S. aureus aureus | ATC ATcGGTtTac AtGAcACaTC TAA | 180 |
| S. auricularis | ATC ATcGGTATgA AAGAcggTTC AAA | 181 |
| S. capitis capitis | ATC ATcGGTATCc AcGAAACTTC TAA | 182 |
| M. caseolyticus | ATC ATTGGTtTaA ctGAAgaacC AAA | 183 |
| S. cohnii | ATC ATcGGTATgc AAGAAgaTTC CAA | 184 |
| S. epidermidis | ATC ATcGGTATgc AcGAAACTTC TAA | 185 |
| S. haemolyticus | ATC ATTGGTATCc AtGAcACTTC TAA | 186 |
| S. haemolyticus | ATC ATTGGTATCc AtGAcACTTC TAA | 189 |
| S. haemolyticus | ATC ATTGGTATCc AtGAcACTTC TAA | 190 |
| S. haemolyticus | ATT ATTGGTATCA AAGAAACTTC TAA | 188 |
| S. hominis | ATT ATTGGTATCA AAGAtACTTC TAA | 196 |
| S. hominis | ATT ATTGGTATCA AAGAAACTTC TAA | 194 |
| S. hominis hominis | ATT ATTGGTATCA AAGAAACTTC TAA | 191 |
| S. hominis | ATT ATTGGTATCA AAGAAACTTC TAA | 193 |
| S. hominis | ATT ATTGGTATCA AAGAAACTTC TAA | 195 |
| S. lugdunensis | ATT ATTGGTATCc AcGAtACTaC TAA | 197 |
| S. saprophyticus | ATC ATcGGTATgc AAGAAgaaTC CAA | 198 |
| S. saprophyticus | ATC ATcGGTATgc AAGAAgaaTC CAA | 200 |
| S. saprophyticus | ATC ATcGGTATgc AAGAAgaaTC CAA | 199 |
| S. sciuri sciuri | ATC ATcGGTtTaA ctGAAgaaTC TAA | 201 |
| S. warneri | ATC ATcGGTtTac AtGAcACTTC TAA | 187 |
| S. warneri | ATC ATcGGTtTac AtGAcACTTC TAA | 192 |
| S. warneri | ATC ATcGGTtTac AtGAcACTTC TAA | 202 |
| S. warneri | ATC ATcGGTtTac AtGAcACTTC TAA | 203 |
| B. subtilis | ATC ATcGGTcTtc AAGAAgagag AAA | —^{a} |
| E. coli | ATC gTTGGTATCA AAGAgACTca GAA | 78 |
| L. monocytogenes | GTT ATcGGTATCg AAGAAgaaag AAA | 138^{b} |
| Selected sequence for | ATTGGTATCA AAGAAACTTC | 597 |
| species-specific | | |
| hybridization probe | | |

The sequence numbering refers to the Staphylococcus aureus tuf gene fragment (SEQ ID NO. 179). Nucleotides in capitals are identical to the selected sequences or match those sequences. Mismatches are indicated by lower-case letters. Dots indicate gaps in the sequences displayed.
^{a}This sequence was obtained from Genbank accession #Z99104.
^{b}The SEQ ID NO. refers to previous patent publication WO98/20157.

Annex XVII: Strategy for the selection of the Enterococcus-specific amplification
primers from tuf sequences.

| | | SEQ | |
|---|---|---|---|
| | | ID | Accession |
| | 270 298 556 582 | NO.: | #: |
| E. avium | TAGAATTAAT GGCTGCTGTT GACGAATAT...TGAA GATATCCAAC GTGGACAAGTATT | 131^{a} | — |
| E. casseliflavus | TGGAATTAAT GGCTGCAGTT GACGAATAC...TGAA GACATCCAAC GTGGACAAGT ATT | 58 | — |
| E. cecorum | TAGAATTAAT GGCTGCAGTT GACGAATAC...TGAA GATATCCAAC GTGGtCAAGT ATT | 59 | — |
| E. dispar | TAGAATTAAT GGCTGCAGTT GACGAATAT...TGAA GATATCCAAC GTGGtCAAGT ATT | 60 | — |
| E. durans | TTGAATTAAT GGCTGCAGTT GACGAATAT...TGAA GACATCCAAC GTGGACAAGT TTT | 61 | — |
| E. flavescens | TGGAATTAAT GGCTGCAGTT GACGAATAC...TGAA GACATCCAAC GTGGACAAGT ATT | 65 | — |
| E. faecium | TTGAATTAAT GGCTGCAGTT GACGAATAC...TGAA GACATCCAAC GTGGACAAGT TTT | 608 | — |
| E. faecalis | TAGAATTAAT GGCTGCAGTT GACGAATAT...TGAA GATATCGAAC GTGGACAAGT ATT | 607 | — |
| E. gallinarum | TGGAATTgAT GGCTGCAGTT GACGAATAC...TGAA GACATCCAAC GTGGACAAGT ATT | 609 | — |
| E. hirae | TTGAATTgAT GGCTGCAGTT GACGAATAT...TGAA GACATCCAAC GTGGACAAGT TTT | 67 | — |
| E. mundtii | TTGAATTgAT GGCTGCAGTT GACGAATAT...TGAA GACATCCAAC GTGGtCAAGT TTT | 68 | — |
| E. pseudoavium | TAGAATTAAT GSCTGCTGTT GACGAATAC...TGAA GACATCCAAC GTGGACAAGT ATT | 69 | — |
| E. raffinosus | TAGAATTAAT GGCTGCTGTT GATGAATAC...TGAA GACATCCAAC GTGGACAAGT ATT | 70 | — |
| E. saccharolyticus | TCGAATTAAT GGCTGCAGTT GACGAATAT...TGAA GACATCCAAC GTGGACAAGT ATT | 71 | — |
| E. solitarius | TGGAcTTAAT GGaTGCAGTT GATGAcTAC...TGAt GATATCGAAC GTGGtCAAGT ATT | 72 | — |
| E. coli | TGGAAcTggc tGgcttccTg GATtctTAY...TGAA GAaATCGAAC GTGGtCAgGT ACT | 78 | — |
| B. cepacia | TGAgccTggc cGacGCgcTg GACacgTAC...TGAA GACgTgGAgC GTGGcCAgGT TCT | 16 | — |
| B. fragilis | TGGAAcTgAT GGaaGCTGTT GATactTGG...GAAc GAaATCaAAC GTGGtatgGT TCT | — | M22247 |
| B. subtilis | TCGAAcTtAT GGaTGCgGTT GATGAgTAC...TGAA GAaATCCAAC GTGGtCAAGT ACT | — | Z99104 |
| C. diphtheriae | TCGAccTcAT GcagGCTtgc KATGAtTCC...CGAA GACgTtGAgC GTGGcCAgGT TGT | 662 | — |
| C. trachomatis | GAGAgcTAAT GcaaGCcGTc GATGAtAAT...GAAc GATgTgGAAa GaGGAatgGT TGT | 22 | — |
| G. vaginalis | AGGAAcTcAT GaagGCTGTT GACGAgTAC...TACc GACgTtGAgC GTGGtCAgGT TGT | 135^{a} | — |
| S. aureus | TAGAATTART GGaaGCTGTa GATactTAC...TGAA GACgTaCAAC GTGGtCAAGT ATT | 179 | — |
| S. pneumoniae | TGGAATTgAT GaacaCAGTT GATGAgTAT...TGAt GAaATCGAAC GTGGACAAGT TAT | 145^{a} | — |
| A. adiacens | TAGAATTAAT GGCTGCTGTT GACGAATAC...TGAA aACATCGAAC GTGGACAAGT TCT | 118^{a} | — |
| G. haemolysans | TCGAATTAAT GGaaaCAGTT GACGAATAC...TGAA GACATCGAAC GTGGACAAGT TTT | 87 | — |
| G. morbillorum | TCGAATTAAT GGaaaCAGTT GACGAgTAC...TGAA GATATCGAAC GTGGACAAGT TTT | 88 | — |
| Selected sequence for | AATTAAT GGCTGCWGTT GAYGAA | 1137 | |
| amplification primer | | | |
| Selected sequence for | A GAYATCSAAC GTGGACAAGT | 1136 | |
| amplification primer^{b} | | | |

The sequence numbering refers to the Enterococcus durans tuf gene fragment (SEQ ID NO. 61). Nucleotides in capitals are identical to the selected sequences or match those sequences. Mismatches are indicated by lower-case letters. Dots indicate gaps in the sequences displayed. “Y” “W” and “S” designate nucleotide positions which are degenerated. “Y” stands for C or T; “W” stands for A or T; “S” stands for C or G. “I” stands for inosine which is a nucleotide analog that can bind to any of the four nucleotides A, C, G or T.
^{a}The SEQ ID NO. refers to previous patent publication WO98/20157.
^{b}This sequence is the reverse-complement of the selected primer.

| Annex XVIII: Strategy for the selection of the Enterococcus faecalis-specific | | | |
|---|---|---|---|
| hybridization probe, of the Enterococcus faecium-specific hybridization | | | |
| probe and of the Enterococcus casseliflavus-flavescens-gallinarum | | | |
| group-specific hybridization probe from tuf sequences. | | | |
| | 395 448...526 549 | SEQ ID NO.: | Accession #: |
| E. avium | GTTGA ACGTGGacAA GTTCGCGTTG GTGACGAAGT TGAAaTcGTa GGTATcGCT...CATc GGTGCtTTGt TACGTGGTGT | 131^{a} | — |
| E. casseliflavus | GTTGA ACGTGGacAA GTTCGCGTTG GTGACGAAGT TGAAaTcGTT GGTATTGCT...CATT GGTGCATTGC TACGTGGTGT | 58 | — |
| E. cecorum | GTTGA ACGTGGacAA GTaCGtGTTG GTGACGAAGT TGAAaTaGTT GGTATcCAT...CATc GGTGCATTat TACGTGGTGT | 59 | — |
| E. dispar | GTTGA ACGTGGacAA GTTCGCGTTG GTGACGAAGT TGAAaTcGTa GGTATcGCT...CATT GGTGCATTat TACGTGGTGT | 60 | — |
| E. durans | GTTGA ACGTGGacAA GTTCGCGTTG GTGACGttGT aGAtaTcGTT GGTATcGCA...CATT GGTGCtTTaC TACGTGGTGT | 61 | — |
| E. faecalis | GTTGA ACGTGGTGAA GTTCGCGTTG GTGACGAAGT TGAAaTcGTT GGTATTAAA...CTTc GGTGCtTTat TACGTGGTGT | 62 | — |
| E. faecium | GTTGA ACGTGGacAA GTTCGCGTTG GTGACGAAGT TGAAGTTGTT GGTATTGCT...CATT GGTGCtTTaC TACGTGGTGT | 608 | — |
| E. flavescens | GTTGA ACGTGGacAA GTTCGCGTTG GTGACGAAGT TGAAaTcGTT GGTATTGCT...CATT GGTGCATTGC TACGTGGGGT | 65 | — |
| E. gallinarum | GTTGA ACGTGGacAA GTTCGCGTTG GTGATGAAGT aGAAaTcGTT GGTATTGCT...CATT GGTGCATTGC TACGTGGGGT | 609 | — |
| E. hirae | GTTGA ACGTGGacAA GTTCGCGTTG GTGACGttGT aGAtaTcGTT GGTATcGCA...CATT GGTGCtTTaC TACGTGGTGT | 67 | — |
| E. mundtii | GTTGA ACGTGGacAA GYTCGtGTTG GTGACGttaT cGAtaTcGTT GGTATcGCA...CATT GGTGCgTTaC TACGTGGTGT | 68 | — |
| E. pseudoavium | GTTGA ACGTGGacAA GTTCGCGTTG GTGACGAAGT TGAAaTcGTa GGTATCGCT...CATc GGTGCATTat TACGTGGTGT | 69 | — |
| E. raffinosus | GTTGA ACGTGGacAA GTTCGCGTTG GTGACGAAGT TGAAaTcGTa GGTATTGCT...CATT GGTGCATTat TACGTGGTGT | 70 | — |
| E. saccharolyticus | GTTGA ACGTGGacAA GTTCGCGTTG GTGACGttGT aGAAaTcGTT GGTATcGAC...CATc GGTGCtTTat TACGTGGGGT | 71 | — |
| E. solitarius | GTTGA ACGcGGgact aTcaaaGTCG GCGATGAAGT TGAcaTTaTT GGTATTCAT...CATT GGTaCtTTGt TACGTGGTGT | 72 | — |
| C. diphtheriae | GTTGA gCGTGGctcc cTgaagGTCA ACGAGGAcGT cGAgaTcaTc GGTATcCGC...CTGT GGTctgcTtC TcCGTGGCGT | 662 | — |
| G. vaginalis | GTTGA gCGTGGTaAg cTcCcaATCA ACACCCcAGT TGAgaTcGTT GGTtTgCGC...CACT GGTcttcTtC TcCGcGGTAT | 135^{a} | — |
| B. cepacia | GTCGA gCGcGGcatc GTgaagGTCG GCGAAGAAaT cGAAaTcGTc GGTATcAAG...CGTT GGTatccTGC TgCGcGGCAC | 16 | — |
| S. aureus | GTTGA ACGTGGTcAA aTcaaaGTTG GTGAAGAAGT TGAAaTcaTc GGTtTaCAT...CATT GGTGCATTat TACGTGGTGT | 179 | — |
| B. subtilis | GTAGA ACGcGGacAA GTTaaaGTCG GTGACGAAGT TGAAaTcaTc GGTcTTCAA...CATT GGTGCccTtC TtCGcGGTGT | — | Z99104 |
| S. pneumoniae | ATCGA cCGTGGTatc GTTaaaGTCA ACGACGAAaT cGAAaTcGTT GGTATcAAA...CGTa GGTGtccTtC TtCGTGGTGT | 145^{a} | — |
| E. coli | GTAGA ACGcGGTatc aTcaaaGTTG GTGAAGAAGT TGAAaTcGTT GGTATcAAA...CGTa GGTGttcTGC TgCGTGGTAT | 78 | — |
| B. fragilis | ATCGA AacTGGTGtt aTcCatGTAG GTGATGAAaT cGAAaTccTc GGTtTgGGT...CGTa GGTctgTTGC TtCGTGGTGT | — | M22247 |
| C. trachomatis | ATTGA gCGTGGaatt GTTaaaGTTT CCGATAAAGT TcAgtTgGTc GGTcTTAGA...CGTT GGattgcTcC TcaGaGGTAT | 22 | — |
| Selected sequences for | GA ACGTGGTGAA GTTCGC (E. faecalis) | 1174 | |
| species-specific or | AAGT TGAAGTTGTT GGTATT (E. faecium) | 602 | |
| group-specific | T GGTGCATTGC TACGTGG | 1122 | |
| hybridization probes | | | |

The sequence numbering refers to the Enterococcus faecium tuf gene fragments (SEQ ID NO. 608).
Nucleotides in capitals are identical to the selected sequences or match those sequences.
Mismatches are indicated by lower-case letters.
Dots indicate gaps in the sequences displayed.
^{a}The SEQ ID NO. refers to previous patent publication WO98/20157.

Annex XIX: Strategy for the selection of primers for the identification of
platelets contaminants from tuf sequences.

| | | |
|---|---|---|
| | SEQ | Accession |
| 467 495 689 717 | ID NO.: | #: |

| | | | |
|---|---|---|---|
| B. cereus | GTA ACTGGTGTaG AGATGTTCCG TAAACT...C AGTTCTACTT CCGTACAACT GACGTAAC | 7 | — |
| B. subtilis | GTT ACaGGTGTTG AAATGTTCCG TAAGCT...C AGTTCTACTT CCGTACAACT GACGTAAC | — | Z99104 |
| E. cloacae | TGT ACTGGCGTTG AAATGTTCCG CAAACT...C AGTTCTACTT CCGTACAACT GACGTGAC | 54 | — |
| E. coli | TGT ACTGGCGTTG AAATGTTCCG CAAACT...C AGTTCTACTT CCGTACTACT GACGTGAC | 78 | — |
| K. oxytoca | TGT ACTGGCGTTG AAATGTTCCG CAAACT...C AGTTCTACTT CCGTACAACT GACGTGAC | 100 | — |
| K. pneumoniae | TGT ACTGGCGTTG AAATGTTCCG CAAACT...C AGTTCTACTT CCGTACTACT GACGTGAC | 103 | — |
| P. aeruginosa | TGC ACcGGCGTTG AAATGTTCCG CAAGCT...C AGTTCTACTT CCGTACCACK GACGTGAC | 153 | — |
| S. agalactiae | GTT ACTGGTGTTG AAATGTTCCG TAAACA...C AATTCTACTT CCGTACAACT GACGTAAC | 209 | — |
| S. aureus | GTT ACaGGTGTTG AAATGTTCCG TAAATT...C AATTCTATTT CCGTACTACT GACGTAAC | 140^{a} | — |
| S. choleraesuis | TGT ACTGGCGTTG AAATGTTCCG CAAACT...C AGTTCTACTT CCGTACTACT GACGTGAC | 159 | — |
| S. epidermidis | GTT ACTGGTGTaG AAATGTTCCG TAAATT...C AATTCTATTT CCGTACTACT GACGTAAC | 611 | — |
| S. marcescens | TGT ACTGGCGTTG AAATGTTCCG CAAACT...C AGTTCTACTT CCGTACCACT GACGTGAC | 168 | — |
| S. mutans | GTT ACTGGTGTTG AAATGTTCCG TAAACA...C AATTCTACTT CCGTACAACT GACGTAAC | 224 | — |
| S. pyogenes | GTT ACTGGTGTTG AAATGTTCCG TAAACA...C AATTCTACTT CCGTACAACT GACGTAAC | — | U40453 |
| S. salivarius | GTT ACTGGTGTTG AAATGTTCCG TAAACA...C AGTTCTACTT CCGTACAACT GACGTAAC | 146^{a} | — |
| S. sanguinis | GTT ACTGGTGTTG AAATGTTCCG TAAACA...C AGTTCTACTT CCGTACAACT GACGTTAC | 227 | — |
| Y. enterocolitica | TGT ACTGGCGTTG AAATGTTCCG CAAACT...C AGTTCTACTT CCGTACAACT GAtGTAAC | 235 | — |
| Selected sequence | ACTGGYGTTG AIATGTTCCG YAA | 636 | |
| for amplification | | | |
| primer | | | |
| Selected sequence | TTCTAYTT CCGTACIACT GACGT | 637 | |
| for amplification | | | |
| primer^{b} | | | |

The sequence numbering refers to the E. coli tuf gene fragment (SEQ ID NO. 78).
Nucleotides in capitals are identical to the selected sequences or match those sequences.
Mismatches are indicated by lower-case letters.
Dots indicate gaps in the sequences displayed.
“R” “Y” “M” “K” “W” and “S” designate nucleotide positions which are degenerated. “R” stands for A or G; “Y” stands for C or T; “M” stands for A or C; “K” stands for G or T; “W” stands for A or T; “S” stands for C or G. “I” stands for inosine which is a nucleotide analog that can bind to any of the four nucleotides A, C, G or T.
^{a}The SEQ ID NO. refers to previous patent publication WO98/20157.
^{b}This sequence is the reverse-complement of the selected primer.

| Annex XX: Strategy for the selection of the universal amplification primers from | | | |
|---|---|---|---|
| atpD sequences. | | | |
| | 616 657 781 812 | SEQ ID NO. | ACCESSION #: |
| C. glutamicum | GTGTTCGGTC AGATGGATGA GCCACCAGGA GTCCGTATG CGC...CGTATg CCTTCCGCCG TGGGTTACCA GCCAAC | — | X76875 |
| M. tuberculosis | GTATTCGGAC AGATGGACGA GCCGCCGGGC aCCCGTATG CGT...CGGATg CCGTCGGCCG TGGGATACCA GCCCAC | — | Z73419 |
| E. faecalis | GTGTTCGGAC AAATGAACGA ACCACCAGGT GCTCGGATG CGG...CGTATg CCTTCTGCCG TTGGTTACCA ACCAAC | 291 | — |
| S. agalactiae | GTCTTTGGTC AAATGAATGA ACCACCAGGA GCACGTATG CGT...CGTATg CCTTCAGCCG TTGGTTATCA ACCAAC | 380 | — |
| B. subtilis | GTATTCGGAC AAATGAACGA GCCGCCGGGC GCACGTATG CGT...CGTATg CCTTCAGCGG TTGGTTATCA GCCGAC | — | Z28592 |
| L. monocytogenes | GTATTCGGTC AAATGAACGA GCCACCAGGT GCGCGTATG CGT...CGTATg CCATCTGCGG TAGGTTACCA ACCAAC | 324 | — |
| S. aureus | GTATTCGGGC AAATGAATGA GCCACCTGGT GCACGTATG CGT...CGTATg CCTTCTGCAG TAGGTTACCA ACCAAC | 366 | — |
| A. baumannii | GTCTACGGTC AGATGAACGA GCCACCAGGT aaCCGTtTa CGC...CGTATg CCATCTGCGG TAGGTTACCA ACCTAC | 243 | — |
| N. gonorrhoeae | GTGTATGGCC AAATGAACGA ACCTCCAGGC aaCCGTcTG CGC...CGTATg CCTTCTGCAG TGGGTTACCA ACCGAC | — | Genome project |
| C. freundii | GTATATGGCC AGATGAACGA GCCGCCTGGA aaCCGTcTG CGT...CGTATg CCATCAGCGG TAGGCTACCA GCCGAC | 264 | — |
| E. cloacae | GTTTACGGCC AGATGAACGA GCCACCAGGA aaCCGTcTG CGC...CGTATg CCTTCAGCGG TAGGTTATCA GCCTAC | 284 | — |
| E. coli | GTGTATGGCC AGATGAACGA GCCGCCGGGA aaCCGTcTG CGC...CGTATg CCTTCAGCGG TAGGTTATCA GCCGAC | 669 | V00267 |
| S. typhimurium | GTGTATGGCC AGATGAACGA GCCGCCGGGA aaCCGTcTG CGC...CGTATg CCTTCCGCAG TAGGTTACCA GCCGAC | 351 | — |
| K. pneumoniae | GTGTACGGCC AGATGAACGA GCCGCCGGGA aaCCGTcTG CGC...CGTATg CCTTCAGCGG TAGGTTATCA GCCGAC | 317 | — |
| S. marcescens | GTTTACGGCC AGATGAACGA GCCACCAGGT aaCCGTcTG CGC...CGTATg CCATCCGCGG TAGGTTATCA GCCAAC | 357 | — |
| Y. enterocolitica | GTTTATGGCC AAATGAATGA GCCACCAGGT aaCCGTcTG CGC...CGTATg CCATCTGCCG TAGGTTACCA GCCAAC | 393 | — |
| B. cepacia | GTGTACGGCC AGATGAACGA GCCGCCGGGC aaCCGTcTG CGC...CGTATg CCGTCGGCAG TGGGCTATCA GCCGAC | — | X76877 |
| H. influenzae | GTTTATGGTC AAATGAACGA GCCACCAGGT aaCCGTtTa CGT...CGTATg CCATCCGCGG TAGGTTACCA ACCGAC | — | U32730 |
| M. pneumoniae | GTGTTTGGTC AGATGAACGA ACCCCCAGGA GCACGGATG CGG...CGGATg CCATCAGCCG TGGGTTACCA ACCAAC | — | U43738 |
| H. pylori | TGCTATGGGC AAATGAATGA GCCACCAGGT GCAAGGAat CGC...CGTATC CCTTCAGCGG TGGGGTATCA GCCCAC | 670 | V00267 |
| B. fragilis | GTGTTCGGAC AGATGAACGA ACCTCCTGGA GCACGTgct TCA...CGTATg CCTTCTGCGG TAGGTTATCA ACCTAC | — | M22247 |
| Selected sequences for | C ARATGRAYGA RCCICCIGGI GYIMGIATG | 562 | |
| universal primers | TAYGGIC ARATGAAYGARCCICCIGGI AA | 564 | |
| Selected sequences for | ATH CCITCIGCIG TIGGITAYCA RCC | 565 | |
| universal primers^{a} | ATG CCITCIGCIG TIGGITAYCA RCC | 563 | |

The sequence numbering refers to the Escherichia coli atpD gene fragment (SEQ ID NO. 669).
Nucleotides in capitals are identical to the selected sequences or match those sequences.
Mismatches for SEQ ID NOs. 562 and 565 are indicated by lower-case letters.
Mismatches for SEQ ID NOs. 564 and 563 are indicated by underlined nucleotides.
Dots indicate gaps in the sequences displayed.
“R” “Y” “M” “K” “W” and “S” letters designate nucleotide positions which are degenerated. “R” stands for A or G; “Y” stands for C or T; “M” stands for A or C; “K” stands for G or T; “W” stands for A or T; “H” stands for A, C or T; “S” stands for C or G. “I” stands for inosine which is a nucleotide analog that can bind to any of the four nucleotides A, C, G or T.
^{a}These sequences are the reverse-complement of the selected primers.

Annex XXI: Specific and ubiquitous primers for
nucleic acid amplification (recA sequences).

Originating
DNA fragment

| | | | |
|---|---|---|---|
| | | SEQ ID | Nucleotide |
| SEQ ID NO. | Nucleotide sequence | NO. | position |

Universal primers (recA)

| | | | |
|---|---|---|---|
| 919 | 5′-GGI CCI GAR TCI TMI GGI AAR AC | 918^{a} | 437-459 |
| 920^{b} | 5′-TCI CCV ATI TCI CCI TCI AIY TC | 918^{a} | 701-723 |
| 921 | 5′-TIY RTI GAY GCI GAR CAI GC | 918^{a} | 515-534 |
| 922^{b} | 5′-TAR AAY TTI ARI GCI YKI CCI CC | 918^{a} | 872-894 |

Sequencing primers (recA)

| | | | |
|---|---|---|---|
| 1605 | 5′-ATY ATY GAA RTI TAY GCI CC | 1704^{a} | 220-239 |
| 1606 | 5′-CCR AAC ATI AYI CCI ACT TTT TC | 1704^{a} | 628-650 |

Universal primers (rad51)

| | | | |
|---|---|---|---|
| 935 | 5′-GGI AAR WSI CAR YTI TGY CAY AC | 939^{a} | 568-590 |
| 936^{b} | 5′-TCI SIY TCI GGI ARR CAI GG | 939^{a} | 1126-1145 |

Universal primers (dmc1)

| | | | |
|---|---|---|---|
| 937 | 5′-ATI ACI GAR GYI TTY GGI GAR TT | 940^{a} | 1038-1060 |
| 938^{b} | 5′-CYI GTI GYI SWI GCR TGI GC | 940^{a} | 1554-1573 |

^{a}Sequences from databases.
^{b}These sequences are from the complementary DNA strand of the sequence of the originating fragment given in the Sequence Listing.

Annex XXII: Specific and ubiquitous primers for nucleic acid
amplification (speA sequences).

Originating
DNA fragment

| | | | |
|---|---|---|---|
| | | SEQ ID | Nucleotide |
| SEQ ID NO. | Nucleotide sequence | NO. | position |

Bacterial species: Streptococcus pyogenes

| | | | |
|---|---|---|---|
| 994 | 5′-TGG ACT AAC AAT CTC GCA AGA GG | 993^{a} | 60-82 |
| 995^{b} | 5′-ACA TTC TCG TGA GTA ACA GGG T | 993^{a} | 173-194 |
| 996 | 5′-ACA AAT CAT GAA GGG AAT CAT TTA G | 993^{a} | 400-424 |
| 997^{b} | 5′-CTA ATT CTT GAG CAG TTA CCA TT | 993^{a} | 504-526 |
| 998 | 5′-GGA GGG GTA ACA AAT CAT GAA GG | 993^{a} | 391-413 |
| 997^{b} | 5′-CTA ATT CTT GAG CAG TTA CCA TT | 993^{a} | 504-526 |

^{a}Sequence from databases.
^{b}These sequences are from the complementary DNA strand of the sequence of the originating fragment given in the Sequence Listing.

Annex XXIII: First strategy for the selection of Streptococcus pyogenes-specific
amplification primers from speA sequences.

| | | |
|---|---|---|
| ACCESSION # | 57 85 170 197 | SEQ ID NO.: |

| | | | |
|---|---|---|---|
| speA | X61573 | CCTT GGgCTAACAA cCTCaCAAGA aGTAT...GTGAtCCT.GT cgtTCAtGAG AATGTAAA | — |
| speA | AF029051 | ~~~~ GGgCTAACAA cCTCaCAAGA aGTAT...GTGAtCCT.GT cgtTCAtGAG AATGTAAA | — |
| speA | X61571 | TCTT GGACTAACAA TCTCGCAAGA GGTAT...GTGACCCT.GT TACTCACGAG AATGTGAA | — |
| speA | X61570 | TCTT GGACTAACAA TCTCGCAAGA GGTAT...GTGACCCT.GT TACTCACGAG AATGTGAA | — |
| speA | X61568 | TCTT GGACTAACAA TCTCGCAAGA GGTAT...GTGACCCT.GT TACTCACGAG AATGTGAA | — |
| speA | X61569 | TCTT GGACTAACAA TCTCGCAAGA GGTAT...GTGACCCT.GT TACTCACGAG AATGTGAA | — |
| speA | X61572 | TCTT GGACTAACAA TCTCGCAAGA GGTAT...GTGACCCT.GT TACTCACGAG AATGTGAA | — |
| speA | X61560 | TCTT GGACTAACAA TCTCGCAAGA GGTAT...GTGACCCT.GT TACTCACGAG AATGTGAA | — |
| speA | U40453 | TCTT GGACTAACAA TCTCGCAAGA GGTAT...GTGACCCT.GT TACTCACGAG AATGTGAA | 993 |
| speA | X61554 | TCTT GGACTAACAA TCTCGCAAGA GGTAT...GTGACCCT.GT TACTCACGAG AATGTGAA | — |
| speA | X61557 | TCTT GGACTAACAA TCTCGCAAGA GGTAT...GTGACCCT.GT TACTCACGAG AATGTGAA | — |
| speA | X61559 | TCTT GGACTAACAA TCTCGCAAGA GGTAT...GTGACCCT.GT TACTCACGAG AATGTGAA | — |
| speA | X61558 | TCTT GGACTAACAA TCTCGCAAGA GGTAT...GTGACCCT.GT TACTCACGAG AATGTGAA | — |
| speA | X61556 | TCTT GGACTAACAA TCTCGCAAGA GGTAT...GTGACCCT.GT TACTCACGAG AATGTGAA | — |
| speA | X61555 | TCTT GGACTAACAA TCTCGCAAGA GGTAT...GTGACCCT.GT TACTCACGAG AATGTGAA | — |
| speA | X61560 | TCTT GGACTAACAA TCTCGCAAGA GGTAT...GTGACCCT.GT TACTCACGAG AATGTGAA | — |
| speA | X61561 | TCTT GGACTAACAA TCTCGCAAGA GGTAT...GTGACCCT.GT TACTCACGAG AATGTGAA | — |
| speA | X61566 | TCTT GGACTAACAA TCTCGCAAGA GGTAT...GTGACCCT.GT TACTCACGAG AATGTGAA | — |
| speA | X61567 | TCTT GGACTAACAA TCTCGCAAGA GGTAT...GTGACCCT.GT TACTCACGAG AATGTGAA | — |
| speA | X61562 | TCTT GGACTAACAA TCTCGCAAGA GGTAT...GTGACCCT.GT TACTCACGAG AATGTGAA | — |
| speA | X61563 | TCTT GGACTAACAA TCTCGCAAGA GGTAT...GTGACCCT.GT TACTCACGAG AATGTGAA | — |
| speA | X61564 | TCTT GGACTAACAA TCTCGCAAGA GGTAT...GTGACCCT.GT TACTCACGAG AATGTGAA | — |
| speA | X61565 | TCTT GGACTAACAA TCTCGCAAGA GGTAT...GTGACCCT.GT TACTCACGAG AATGTGAA | — |
| speA | AF055698 | ~~~~ GGACTAACAA TCTCGCAAGA GGTAT...GTGACCCT.GT TACTCACGAG AATGTGAA | — |
| speA | X03929^{a} | TCTT GGACTAACAA TCTtGCcAaA aGGTA...GTGACCCTGGT TACTCACGAG AATGTGAA | — |

| | | |
|---|---|---|
| Selected | T GGACTAACAA TCTCGCAAGA GG | 994 |
| sequence for | | |
| species-specific | | |
| primer | | |
| Selected | ACCCT.GT TACTCACGAG AATGT | 995 |
| sequence for | | |
| species-specific | | |
| primer^{b} | | |

The sequence numbering refers to the Streptococcus pyogenes speA gene fragment (SEQ ID NO. 993).
Nucleotides in capitals are identical to the selected sequences or match those sequences.
Mismatches are indicated by lower-case letters.
“~” indicate incomplete sequence data.
Dots indicate gaps in the sequences displayed.
^{a}The extra G nucleotide introducing a gap in the sequence is probably a sequencing error.
^{b}This sequence is the reverse-complement of the selected primer.

Annex XXIV: Second strategy for the selection of Streptococcus pyogenes-specific
amplification primers from speA sequences.

| | | |
|---|---|---|
| | | SEQ ID |
| Accession # | 388 427 501 529 | NO.: |

| | | | |
|---|---|---|---|
| speA | X61573 | TA TGGAGGGGTA ACAAATCATG AAGGGAATCA TTTAGAAA...AAAAATGGT AACTGCTCAA GAATTAGACT | — |
| speA | AF029051 | TA TGGAGGGGTA ACAAATCATG AAGGGAATCA TTTAGAAA...AAAAATGGT AACTGCTCAA GAATTAGACT | — |
| speA | X61571 | TA CGGAGGGGTA ACAAATCATG AAGGGAATCA TTTAGAAA...AAAAATGGT AACTGCTCAA GAATTAGACT | — |
| speA | X61570 | TA CGGAGGGGTA ACAAATCATG AAGGGAATCA TTTAGAAA...AAAAATGGT AACTGCTCAA GAATTAGACT | — |
| speA | X61568 | TA CGGAGGGGTA ACAAATCATG AAGGGAATCA TTTAGAAA...AAAAATGGT AACTGCTCAA GAATTAGACT | — |
| speA | X61569 | TA CGGAGGGGTA ACAAATCATG AAGGGAATCA TTTAGAAA...AAAAATGGT AACTGCTCAA GAATTAGACT | — |
| speA | X61572 | TA CGGAGGGGTA ACAAATCATG AAGGGAATCA TTTAGAAA...AAAAATGGT AACTGCTCAA GAATTAGACT | — |
| speA | X61560 | TA CGGAGGGGTA ACAAATCATG AAGGGAATCA TTTAGAAA...AAAAATGGT AACTGCTCAA GAATTAGACT | — |
| speA | U40453 | TA CGGAGGGGTA ACAAATCATG AAGGGAATCA TTTAGAAA...AAAAATGGT AACTGCTCAA GAATTAGACT | 993 |
| speA | X61554 | TA CGGAGGGGTA ACAAATCATG AAGGGAATCA TTTAGAAA...AAAAATGGT AACTGCTCAA GAATTAGACT | — |
| speA | X61557 | TA CGGAGGGGTA ACAAATCATG AAGGGAATCA TTTAGAAA...AAAAATGGT AACTGCTCAA GAATTAGACT | — |
| speA | X61559 | TA CGGAGGGGTA ACAAATCATG AAGGGAATCA TTTAGAAA...AAAAATGGT AACTGCTCAA GAATTAGACT | — |
| speA | X61558 | TA CGGAGGGGTA ACAAATCATG AAGGGAATCA TTTAGAAA...AAAAATGGT AACTGCTCAA GAATTAGACT | — |
| speA | X61556 | TA CGGAGGGGTA ACAAATCATG AAGGGAATCA TTTAGAAA...AAAAATGGT AACTGCTCAA GAATTAGACT | — |
| speA | X61555 | TA CGGAGGGGTA ACAAATCATG AAGGGAATCA TTTAGAAA...AAAAATGGT AACTGCTCAA GAATTAGACT | — |
| speA | X61560 | TA CGGAGGGGTA ACAAATCATG AAGGGAATCA TTTAGAAA...AAAAATGGT AACTGCTCAA GAATTAGACT | — |
| speA | X61561 | TA CGGAGGGGTA ACAAATCATG AAGGGAATCA TTTAGAAA...AAAAATGGT AACTGCTCAA GAATTAGACT | — |
| speA | X61566 | TA CGGAGGGGTA ACAAATCATG AAGGGAATCA TTTAGAAA...AAAAATGGT AACTGCTCAA GAATTAGACT | — |
| speA | X61567 | TA CGGAGGGGTA ACAAATCATG AAGGGAATCA TTTAGAAA...AAAAATGGT AACTGCTCAA GAATTAGACT | — |
| speA | X61562 | TA CGGAGGGGTA ACAAATCATG AAGGGAATCA TTTAGAAA...AAAAATGGT AACTGCTCAA GAATTAGACT | — |
| speA | X61563 | TA CGGAGGGGTA ACAAATCATG AAGGGAATCA TTTAGAAA...AAAAATGGT AACTGCTCAA GAATTAGACT | — |
| speA | X61564 | TA CGGAGGGGTA ACAAATCATG AAGGGAATCA TTTAGAAA...AAAAATGGT AACTGCTCAA GAATTAGACT | — |
| speA | X61565 | TA CGGAGGGGTA ACAAATCATG AAGGGAATCA TTTAGAAA...AAAAATGGT AACTGCTCAA GAATTAGACT | — |
| speA | AF055698 | TA CGGAGGGGTA ACAAATCATG AAGGGAATCA TTTAGAAA...AAAAATGGT AACTGCTCAA GAATTAGACT | — |
| speA | X03929 | TA CGGAGGGGTA ACAAATCATG AAGGGAATCA TTTAGAAA...AAAAATGGT AACTGCTCAA GAATTAG.CT | — |

| | | |
|---|---|---|
| Selected | GGAGGGGTA ACAAATCATG AAGG | 998 |
| sequences for | | |
| species-specific | ACAAATCATG AAGGGAATCA TTTAG | 996 |
| primers | | |
| Selected | AATGGT AACTGCTCAA GAATTAG | 997 |
| sequence for | | |
| species-specific | | |
| primer^{a} | | |

The sequence numbering refers to the Streptococcus pyogenes speA gene fragment (SEQ ID NO. 993).
Dots indicate gaps in the sequences displayed.
^{a}This sequence is the reverse-complement of the selected primer.

| Annex XXV: Strategy for the selection of Streptococcus pyogenes-specific | | |
|---|---|---|
| amplification primers from tuf sequences. | | |
| | | SEQ |
| | | ID |
| | 140 186 619 647 | NO.: |
| S. anginosus | A AGTTGACtTg GTTGACGAtG AAGAaTTGCT TGAATTgGTT GAaATG...CC AgGTTCAATt cAtCCACACA CTAAATT | 211 |
| S. bovis | A AGTTGACCTT GTTGATGACG AAGAaTTGCT TGAATTgGTT GAaATG...CC AgGTTCAATC cACCCACACA CTAAATT | 212 |
| S. dysgalactiae | A AATTGACCTT GTTGAcGAtG AAGAaTTGCT TGAATTgGTT GAaATG...CC AgGTTCAATC AACCCACABCA CTAAATT | 217 |
| S. pyogenes | A AGTTGACCTT GTTGATGACG AAGAGTTGCT TGAATTAGTT GAGATG...CC AAGTTCAATC AACCCACABCA CTAAATT | 1002 |
| S. agalactiae | A AGTTGACCTT GTTGATGAtG AAGAaTTGCT TGAATTgGTT GAaATG...CC AgGTTCAATC AACCCACABCA CTAAATT | 144^{a} |
| S. oralis | A AATTGACtTg GTAGAcGACG AAGAaTTGCT TGAATTgGTT GAaATG...CC AgGTTCAATC AACCCACABCA CTAAATT | 985 |
| S. pneumoniae | A AGTTGACtTg GTTGAcGACG AAGAaTTGCT TGAATTgGTT GAaATG...CC AgGTTCAATC AACCCACABCA CTAAATT | 145^{a} |
| S. cristatus | A GATCGACtTg GTTGATGACG AAGAaTTGCT TGAATTgGTT GAaATG...CC AgGTTCAATC AACCCACABCA CTAAATT | 215 |
| S. mitis | A GATCGACtTg GTTGATGACG AAGAaTTGCT TGAATTgGTT GAaATG...CC AgGTTCAATC AACCCACABCA CTAAATT | 982 |
| S. gordonii | A AGTTGACtTg GTTGAcGAtG AAGAaTTGCT TGAGTTgGTT GAaATG...CC AgGTTCAATC AACCCACABCA CTAAATT | 200 |
| S. sanguinis | A AGTTGACtTg GTTGAcGAtG AAGAaTTGCT TGAATTgGTT GAaATG...CC AgGTTCAATC AACCCACABCA CTAAATT | 227 |
| S. parasanguinis | A AGTTGACtTg GTTGATGAtG AAGAaTTGCT TGAATTgGTT GAaATG...CC AgGTTCAATC AACCCACABCA CTAAATT | 225 |
| S. salivarius | A AGTTGACtTg GTTGAcGAtG AAGAaTTGCT TGAATTgGTT GAaATG...CC TgGTTCAATC AACCCACABCA CTAAATT | 146^{a} |
| S. vestibularis | A AGTTGACtTg GTTGAcGAtG AAGAaTTGCTTGAATTgGTT GAaATG.. CC TgGTTCAATC AACCCACABCA CTAAATT | 231 |
| S. suis | A AGTTGACtTg GTTGAcGAtG AAGAaTTGCT TGAgTTgGTT GAaATG...CC AgGTTCtATC AACCCACABCA CTAAATT | 229 |
| S. mutans | A AGTTGAttTg GTTGAcGAtG AAGAaTTGCT TGAATTgGTT GAaATG...CC AgGTTCAATt cACCCACACA CTAAATT | 224 |
| S. ratti | A GGTTGACtTg GTTGATGAtG AAGAa TTGCT TGAATTgGTT GAaATG...CC AgGTTCAATt cAtCCgCAcA CTAAATT | 226 |
| S. macacae | A AGTTGACtTa GTTGATGAtG AAGAaTTGCT TGAATTgGTT GAaATG...CC AgGATCAATt cAtCCACAcA CTAAATT | 222 |
| S. cricetus | A GGTTGACtTg GTTGAcGAtG AAGAaTTGCT TGAATTgGTT GAaATG...CC TgGTTCAATC cAtCCACACA CTAAATT | 214 |
| E. faecalis | A AATgGAtaTg GTTGATGACG AAGAaTTatT aGAATTAGTa GAaATG...CC AgcTaCAATC ActCCACACA CaAAATT | 607 |
| S. aureus | A AGTTGACaTg GTTGAcGAtG AAGAaTTatT aGAATTAGTa GAaATG...CC TgGTTCAATt AcaCCACACA CTgAATT | 176 |
| B. cereus | A ATgcGACaTg GTaGATGACG AAGAaTTatT aGAATTAGTa GAaATG...AG CgGTTCtgTa AAagCtCACg CTAAATT | 7 |
| E. coli | A ATgcGACaTg GTTGATGACG AAGAGcTGCT gGAAcTgGTT GAaATG...CC GgGCaCcATC AAgCCgCACA CcAAGTT | 78 |
| Selected sequences for species-specific | TTGACCTT GTTGATGACG AAGAG | 999 |
| primers | AAGAGTTGCT TGAATTAGTT GAG | 1001 |
| Selected sequence for species-specific primer | AGTTCAATC AACCCACABCA CTAA | 1000 |
| ^{b} | | |

The sequence numbering refers to the Streptococcus pyogenes tuf gene fragment (SEQ ID NO. 1002).
Nucleotides in capitals are identical to the selected sequences or match those sequences.
Mismatches are indicated by lower-case letters.
Dots indicate gaps in the sequences displayed.
^{a}The SEQ ID NO. refers to previous patent publication WO98/20157.
^{b}This sequence is the reverse-complement of the selected primer.

| Annex XXVI: Strategy for the selection stx₁-specific amplification primers and | | | |
|---|---|---|---|
| hybridization probe. | | | |
| | | | SEQ ID |
| | Accession # | 230 263 343 375 391 421 | NO.: |
| stx₁ | M19473a | TTGATGTC AGAGGGATAG ATCCAGAGGA AGGGCG...TATCG CTTTGCTGAT TTTTCACATG TTACCTTT...GTTACAT TGTCTGGTGA CAGTAGCTAT ACCA | — |
| stx₁ | M16625 | TTGATGTC AGAGGGATAG ATCCAGAGGA AGGGCG...TATCG CTTTGCTGAT TTTTCACATG TTACCTTT...GTTACAT TGTCTGGTGA CAGTAGCTAT ACCA | — |
| stx₁ | M17358 | TTGATGTC AGAGGGATAG ATCCAGAGGA AGGGCG...TATCG CTTTGCTGAT TTTTCACATG TTACCTTT...GTTACAT TGTCTGGTGA CAGTAGCTAT ACCA | — |
| stx₁ | Z36900 | TTGATGTC AGAGGGATAG ATCCAGAGGA AGGGCG...TATCG CTTTGCTGAT TTTTCACATG TTACCTTT...GTTACAT TGTCTaGTGA CAGTAGCTAT ACCA | — |
| stx₁ | L04539 | TTGATGTC AGAGGGATAG ATCCAGAGGA AGGGCG...TATCG CTTTGCTGAT TTTTCACATG TTACCTTT...GTTACAT TGTCTGGTGA CAGTAGCTAT ACCA | — |
| stx₁ | M19437 | TTGATGTC AGAGGGATAG ATCCAGAGGA AGGGCG...TATCG CTTTGCTGAT TTTTCACATG TTACCTTT...GTTACAT TGTCTGGTGA CAGTAGCTAT ACCA | — |
| stx₁ | M24352 | TTGATGTC AGAGGGATAG ATCCAGAGGA AGGGCG...TATCG CTTTGCTGAT TTTTCACATG TTACCTTT...GTTACAT TGTCTGGTGA CAGTAGCTAT ACCA | — |
| stx₁ | X07903 | TTGATGTC AGAGGGATAG ATCCAGAGGA AGGGCG...TATCG CTTTGCTGAT TTTTCACATG TTACCTTT...GTTACAT TGTCTGGTGA CAGTAGCTAT ACCA | — |
| stx₁ | Z36899 | TTGATGTC AGAGGGATAG ATCCAGAGGA AGGGCG...TATCG CTTTGCTGAT TTTTCACATG TTACCTTT...GTTACAT TGTCTGGTGA CAGTAGCTAT ACCA | — |
| stx₁ | Z36901 | TTGATGTC AGAGGGATAG ATCCAGAGGA AGGGCG...TATCG CTTTGCTGAT TTTTCACATG TTACCTTT...GTTACAT TGTCTGGTGA CAGTAGCTAT ACCA | 1076 |
| stx₂ | X61283 | TGGATaTa cGAGGGcTtG ATgtctAtcA gGcGCG...TACCG tTTTtCaGAT TTTaCACATa TatCaGTG...GTTtCca TGaCaacgGA CAGcAGtTAT ACCA | — |
| stx₂ | L11079 | TGGATaTa cGAGGGcTtG ATgtctAtcA gGcGCG...TACCG tTTTtCaGAT TTTaCACATa TatCaGTG...GTTtCca TGaCaacgGA CAGcAGtTAT ACCA | — |
| stx₂ | M21534 | TAGgTaTa cGAGGGcTtG ATgtttAtcA gGaGCG...TACaG aTTTtCaGAT TTTgCACATa TatCaTTG...ATTtCca TGaCaacgGA CAGcAGtTAT ACCA | — |
| stx₂ | M36727 | TAGgTaTa cGAGGGcTtG ATgtttAtcA gGaGCG...TACaG aTTTtCaGAT TTTgCACATa TatCaTTG...ATTtCca TGaCaacgGA CAGcAGtTAT ACCA | — |
| stx₂ | X81415 | TAGgTaTa cGAGGGcTtG ATgtttAtcA gGaGCG...TACaG aTTTtCaGAT TTTgCACATa TatCaTTG...ATTtCca TGaCaacgGA CAGcAGtTAT ACCA | — |
| stx₂ | X81416 | TAGgTaTa cGAGGGcTtG ATgtttAtcA gGaGCG...TACaG aTTTtCaGAT TTTgCACATa TatCaTTG...ATTtCca TGaCaacgGA CAGcAGtTAT ACCA | — |
| stx₂ | X81417 | TAGgTaTa cGAGGGcTtG ATgtttAtcA gGaGCG...TACaG aTTTtCaGAT TTTgCACATa TatCaTTG...ATTtCca TGaCaacgGA CAGcAGtTAT ACCA | — |
| stx₂ | X81418 | TAGgTaTa cGAGGGcTtG ATgtttAtcA gGaGCG...TACaG aTTTtCaGAT TTTgCACATa TatCaTTG...ATTtCca TGaCaacgGA CAGcAGtTAT ACCA | — |
| stx₂ | E03962 | TGGATaTa cGAGGGcTtG ATgtctAtcA gGcGCG...TACCG tTTTtCaGAT TTTaCACATa TatCaGTG...GTTtCca TGaCaacgGA CAGcAGtTAT ACCA | — |
| stx₂ | E03959 | TGGATaTa cGAGGGcTtG ATgtctAtcA gGcGCG...TACCG tTTTtCaGAT TTTaCACATa TatCaGTG...GTTtCca TGaCaacgGA CAGcAGtTAT ACCA | — |
| stx₂ | X07865 | TGGATaTa cGAGGGcTtG ATgtctAtcA gGcGCG...TACCG tTTTtCaGAT TTTaCACATa TatCaGTG...GTTtCca TGaCaacgGA CAGcAGtTAT ACCA | — |
| stx₂ | Y10775 | TGGATaTa cGAGGGcTtG ATgtctAtcA gGcGCG...TACCG tTTTtCaGAT TTTaCACATa TatCaGTG...GTTtCca TGaCaacgGA CAGcAGtTAT ACCA | — |
| stx₂ | Z37725 | TGGATaTa cGAGGGcTtG ATgtctAtcA gGcGCG...TACCG tTTTtCaGAT TTTaCACATa TatCaGTG...GTTtCca TGaCaacgGA CAGcAGtTAT ACCA | 1077 |
| stx₂ | Z50754 | TGGATaTa cGAGGGcTtG ATgtctAtcA gGcGCG...TACCG tTTTtCaGAT TTTaCACATa TatCaGTG...GTTtCca TGaCaacgGA CAGcAGtTAT ACCA | — |
| stx₂ | X67514 | TGGATaTa cGAGGGcTtG ATgtctAtcA gGcGCG...TACCG tTTTtCaGAT TTTaCACATa TatCaGTG...GTTtCca TGaCaacgGA CAGcAGtTAT ACCA | — |
| stx₂ | L11078 | TGGATaTa cGAGGGcTtG ATgtctAtcA gGcGCG...TACCG tTTTtCaGAT TTTaCACATa TatCaGTG...GTTtCca TGaCaacgGA CAGcAGtTAT ACCA | — |
| stx₂ | X65949 | TGGATaTa cGAGGGcTtG ATgtctAtcA gGcGCG...TACCG tTTTtCaGAT TTTaCACATa TatCaGTG...GTTtCca TGaCaacgGA CAGcAGtTAT ACCA | — |
| stx₂ | AF043627 | TGGATaTa cGAGGGcTtG ATgtctAtcA gGcGCG...TACaG aTTTtCaGAT TTTgCACATa TatCaGTG...GTTtCca TGaCaacgGA CAGcAGtTAT ACCA | — |

| | | |
|---|---|---|
| Selected sequence for | ATGTC AGAGGGATAG ATCCAGAGGA AGG | 1081 |
| amplification primer | | |
| Selected sequence for | CG CTTTGCTGAT TTTTCACATG TTACC | 1084 |
| hybridization probe | | |
| Selected sequence for | ACAT TGTCTGGTGA CAGTAGCTAT A | 1080 |
| amplification primer^{a} | | |

The sequence numbering refers to the Escherichia coli stx₁ gene fragment (SEQ ID NO. 1076). Nucleotides in capitals are identical to the selected sequences or match those sequences. Mismatches are indicated by lower-case letters. Dots indicate gaps in the sequences displayed.
^{a}This sequence is the reverse-complement of the selected primer.

| Annex XXVII: Strategy for the selection of stx₂-specific amplification primers and | | | |
|---|---|---|---|
| hybridization probe. | | | |
| | Accession # | 543 570 614 641 684 708 | SEQ ID NO.: |
| stx₁ | M19473 | AGCga TgtTaCGgTT TGTtACTGTG ACA...CAAC ACTGgaTGAt ctcAgTGggC gTtcTTA...A AGgtTgAGtA gCGTcCTgCC tGAC | — |
| stx₁ | M16625 | AGCga TgtTaCGgTT TGTtACTGTG ACA...CAAC ACTGgaTGAt ctcAgTGggC gTtcTTA...A AGgtTgAGtA gCGTcCTgCC tGAC | — |
| stx₁ | M17358 | AGCga TgtTaCGgTT TGTtACTGTG ACA...CAAC ACTGgaTGAt ctcAgTGggC gTtcTTA...A AGgtTgAGtA gCGTcCTgCC tGAC | — |
| stx₁ | Z36900 | AGCga TgtTaCGgTT TGTtACTGTG ACA...CAAC ACTGgaTGAt ctcAgTGggC gTtcTTA...A AGgtTgAGtA gTGTcCTgCC tGAT | — |
| stx₁ | L04539 | AGCga TgtTaCGgTT TGTtACTGTG ACA...CAAC ACTGgaTGAt ctcAgTGggC gTtcTTA...A AGgtTgAGtA gTGTcCTgCC tGAT | — |
| stx₁ | M19437 | AGCga TgtTaCGgTT TGTtACTGTG ACA...CAAC ACTGgaTGAt ctcAgTGggC gTtcTTA...A AGgtTgAGtA gTGTcCTgCC tGAC | — |
| stx₁ | M24352 | AGCga TgtTaCGgTT TGTtACTGTG ACA...CAAC ACTGgaTGAt ctcAgTGggC gTtcTTA...A AGgtTgAGtA gTGTcCTgCC tGAC | — |
| stx₁ | X07903 | AGCga TgtTaCGgTT TGTtACTGTG ACA...CAAC ACTGgaTGAt ctcAgTGggC gTtcTTA...A AGgtTgAGtA gTGTcCTgCC tGAC | — |
| stx₁ | Z36899 | AGCga TgtTaCGgTT TGTtACTGTG ACA...CAAC ACTGgaTGAt ctcAgTGggC gTtcTTA...A AGgtTgAGtA gTGTcCTgCC tGAC | — |
| stx₁ | Z36901 | AGCga TgtTaCGgTT TGTtACTGTG ACA...CAAC ACTtgaTGAt ctcAgTGggC gTtcTTA...A AGgtTgAGtA gTGTcCTgCC tGAC | 1076 |
| stx₂ | X61283 | AGCAG TTCTGCGTTT TGTCACTGTC ACA...AGGC ACTGTCTGA. ..AACTGCTC CTGTGTA...G CGAATCAGCA ATGTGCTTCC GGAG | — |
| stx₂ | L11079 | AGCAG TTCTGCGTTT TGTCACTGTC ACA...AGGC ACTGTCTGA. ..AACTGCTC CTGTGTA...G CGAATCAGCA ATGTGCTTCC GGAG | — |
| stx₂ | M21534 | AGCAG TTCTGCGTTT TGTCACTGTC ACA...TGGC ACTGTCTGA. ..AACTGCTC CTGTTTA...G AGAATCAGCA ATGTGCTTCC GGAG | — |
| stx₂ | M36727 | AGCAG TTCTGCGTTT TGTCACTGTC ACA...TGGC ACTGTCTGA. ..AACTGCTC CTGTTTA...G AGAATCAGCA ATGTGCTTCC GGAG | — |
| stx₂ | U72191 | AGCAG TTCTGCGTTT TGTCACTGTC ACA...TGGC ACTGTCTGA. ..AACTGCTC CTGTTTA...G AGAATCAGCA ATGTGCTTCC GGAG | — |
| stx₂ | X81415 | AGCAG TTCTGCGTTT TGTCACTGTC ACA...TGGC ACTGTCTGA. ..AACTGCTC CTGTTTA...G AGAATCAGCA ATGTGCTTCC GGAG | — |
| stx₂ | X81416 | AGCAG TTCTGCGTTT TGTCACTGTC ACA...TGGC ACTGTCTGA. ..AACTGCTC CTGTTTA...G AGAATCAGCA ATGTGCTTCC GGAG | — |
| stx₂ | X81417 | AGCAG TTCTGCGTTT TGTCACTGTC ACA...TGGC ACTGTCTGA. ..AACTGCTC CTGTTTA...G AGAATCAGCA ATGTGCTTCC GGAG | — |
| stx₂ | X81418 | AGCAG TTCTGCGTTT TGTCACTGTC ACA...TGGC ACTGTCTGA. ..AACTGCTC CTGTTTA...G AGAATCAGCA ATGTGCTTCC GGAG | — |
| stx₂ | E03962 | AGCAG TTCTGCGTTT TGTCACTGTC ACA...AGGC ACTGTCTGA. ..AACTGCTC CTGTGTA...G CGAATCAGCA ATGTGCTTCC GGAG | — |
| stx₂ | E03959 | AGCAG TTCTGCGTTT TGTCACTGTC ACA...AGGC ACTGTCTGA. ..AACTGCTC CTGTGTA...G CGAATCAGCA ATGTGCTTCC GGAG | — |
| stx₂ | X07865 | AGCAG TTCTGCGTTT TGTCACTGTC ACA...AGGC ACTGTCTGA. ..AACTGCTC CTGTGTA...G CGAATCAGCA ATGTGCTTCC GGAG | — |
| stx₂ | Y10775 | AGCAG TTCTGCGTTT TGTCACTGTC ACA...AGGC ACTGTCTGA. ..AACTGCTC CTGTGTA...G CGAATCAGCA ATGTGCTTCC GGAG | — |
| stx₂ | Z37725 | AGCAG TTCTGCGTTT TGTCACTGTC ACA...AGGC ACTGTCTGA. ..AACTGCTC CTGTGTA...G CGAATCAGCA ATGTGCTTCC GGAG | 1077 |
| stx₂ | Z50754 | AGCAG TTCTGCGTTT TGTCACTGTC ACA...AGGC ACTGTCTGA. ..AACTGCTC CTGTGTA...G CGAATCAGCA ATGTGCTTCC GGAG | — |
| stx₂ | X67514 | AGCAG TTCTGCGTTT TGTCACTGTC ACA...AGGC ACTGTCTGA. ..AACTGCTC CTGTGTA...G CGAATCAGCA ATGTGCTTCC GGAG | — |
| stx₂ | L11078 | AGCAG TTCTGCGTTT TGTCACTGTC ACA...AGGC ACTGTCTGA. ..AACTGCTC CTGTGTA...G AGAATCAGCA ATGTGCTTCC GGAG | — |
| stx₂ | X65949 | AGCAG TTCTGCGTTT TGTCACTGTC ACA...AGGC ACTGTCTGA. ..AACTGCTC CTGTGTA...G AGAATCAGCA ATGTGCTTCC GGAG | — |
| stx₂ | AF043627 | AGCAG TTCTGCGTTT TGTCACTGTC ACA...TGGC ACTGTCTGA. ..AACTGCTC CTGTTTA...G AGAATCAGCA ATGTGCTTCC GGAG | — |

| | | |
|---|---|---|
| Selected sequence for amplification | AG TTCTGCGTTT TGTCACTGTC | 1078 |
| primer | | |
| Selected sequence for hybridization | C ACTGTCTGA. ..AACTGCTC CTGT | 1085 |
| probe | | |
| Selected sequence for amplification | AATCAGCA ATGTGCTTCC G | 1079 |
| primer^{a} | | |

The sequence numbering refers to the Escherichia coli stx₂ gene fragment (SEQ ID NO. 1077). Nucleotides in capitals are identical to the selected sequences or match those sequences. Mismatches are indicated by lower-case letters. Dots indicate gaps in the sequences displayed.
^{a}This sequence is the reverse-complement of the selected primer.

Annex XXVIII: Strategy for the selection of vanA-specific amplification primers from
van sequences.

| | | |
|---|---|---|
| Accession # | 926 952 1230 1255 | SEQ ID NO.: |

| | | | |
|---|---|---|---|
| vanA | X56895 | GTCAAT AGCGCGGACG AATTGGACTA C...GT AGAGGTCTAG CCCGTGTGGA TATG | 1139 |
| vanA | M97297 | GTCAAT AGCGCGGACG AATTGGACTA C...GT AGAGGTCTAG CCCGTGTGGA TATG | 1141 |
| vanA | — | GTCAAT AGCGCGGACG AATTGGACTA C...GT AGAGGTCTAG CCCGTGTGGA TATG | 1051 |
| vanA | — | GTCAAT AGCGCGGACG AATTGGACTA C...GT AGAGGTCTAG CCCGTGTGGA TATG | 1052 |
| vanA | — | GTCAAT AGCGCGGACG AATTGGACTA C...GT AGAGGTCTAG CCCGTGTGGA TATG | 1053 |
| vanA | — | GTCAAT AGCGCGGACG AATTGGACTA C...GT AGAGGTCTAG CCCGTGTGGA TATG | 1054 |
| vanA | — | GTCAAT AGCGCGGACG AATTGGACTA C...GT AGAGGTCTAG CCCGTGTGGA TATG | 1055 |
| vanA | — | GTCAAT AGCGCGGACG AATTGGACTA C...GT AGAGGTCTAG CCCGTGTGGA TATG | 1056 |
| vanA | — | GTCAAT AGCGCGGACG AATTGGACTA C...GT AGAGGTCTAG CCCGTGTGGA TATG | 1057 |
| vanA | — | GTCAAT AGCGCGGACG AATTGGACTA C...GT AGAGGTCTAG CCCGTGTGGA TATG | 1049 |
| vanA | — | GTCAAT AGCGCGGACG AATTGGACTA C...GT AGAGGTCTAG CCCGTGTGGA TATG | 1050 |
| vanB | U94526 | GTAAAc gGtaCGGAaG AAcTtaACGC T...GC AGAGGgCTtG CCCGTGTtGA TCTT | 1117 |
| vanB | U94527 | GTAAAc AGtaCGGAaG AAcTaaACGC T...GC AGAGGgCTtG CtCGTGTtGA TCTT | — |
| vanB | U94528 | GTAAAc gGtaCGGAaG AAcTtaACGC T...GC AGAGGgCTtG CCCGTGTtGA TCTT | — |
| vanB | U94529 | GTAAAc gGtaCGGAaG AAcTtaACGC T...GC AGAGGgCTtG CCCGTGTtGA TCTT | — |
| vanB | U94530 | GTAAAc gGtaCGGAaG AAcTtaACGC T...GC AGAGGgCTtG CCCGTGTtGA TCTT | — |
| vanB | Z83305 | GTAAAc gGtaCGGAaG AAcTtaACGC T...GC AGAGGgCTtG CCCGTGTtGA TCTT | — |
| vanB | U81452 | GTAAAc gGtaCGGAaG AAcTtaACGC T...GC AGAGGgCTtG CCCGTGTtGA TCTT | — |
| vanB | U35369 | GTAAAc AGtaCGGAaG AAcTaaACGC T...GC AGAGGgCTtG CtCGTGTtGA TCTT | — |
| vanB | U72704 | GTAAAc gGtaCGGAaG AAcTtaACGC T...GC AGAGGgCTtG CCCGTGTtGA TCTT | — |
| vanB | L06138 | GTAAAc AGtaCGGAaG AAcTaaACGC T...GC AGAGGgCTtG CtCGTGTtGA TCTT | — |
| vanB | L15304 | GTAAAc gGtaCGGAaG AAcTtaACGC T...GC AGAGGgCTtG CCCGTGTtGA TCTT | — |
| vanB | U00456 | GTAAAc AGtaCGGAaG AAcTaaACGC T...GC AGAGGgCTtG CtCGTGTtGA TCTT | — |
| vanD | AF130997 | GTAtgc AagGCaGAaG AAcTGcAgGC A...GC AGAGGatTgG CCCGcaTtGA cCTG | — |
| vanE | AF136925 | GTAgAa caaaaaagtG AtTTatAtAA A...GC AaAGGatTAG CgaGaaTcGA cTTT | — |

| | | |
|---|---|---|
| Selected sequence for | AAT AGCGCGGACG AATTGGAC | 1090 |
| amplification primer | | |
| Selected sequence for | GAGGTCTAG CCCGTGTGGA T | 1089 |
| amplification primer^{a} | | |

The sequence numbering refers to the Enterococcus faecium vanA gene fragment (SEQ ID NO. 1139). Nucleotides in capitals are identical to the selected sequences or match those sequences. Mismatches are indicated by lower-case letters. Dots indicate gaps in the sequences displayed.
^{a}This sequence is the reverse-complement of the above selected primer.

Annex XXIX: Strategy for the selection of vanB-specific amplification primers from
van sequences.

| | | |
|---|---|---|
| Accession # | 470 495 608 633 | SEQ ID NO.: |

| | | | |
|---|---|---|---|
| vanA | X56895 | A CGCaATtGAA tCgGCAaGAC AATAT...ACG GaATCTTtCG tATtCATCAG GAA | 1139 |
| vanA | M97297 | A CGCaATtGAA tCgGCAaGAC AATAT...ACG GaATCTTtCG tATtCATCAG GAA | 1141 |
| vanA | — | A CGCaATtGAA tCgGCAaGAC AATAT...ACG GaATCTTtCG tATtCATCAG GAA | 1051 |
| vanA | — | A CGCaATtGAA tCgGCAaGAC AATAT...ACG GaATCTTtCG tATtCATCAG GAA | 1052 |
| vanA | — | A CGCaATtGAA tCgGCAaGAC AATAT...ACG GaATCTTtCG tATtCATCAG GAA | 1053 |
| vanA | — | A CGCaATtGAA tCgGCAaGAC AATAT...ACG GaATCTTtCG tATtCATCAG GAA | 1054 |
| vanA | — | A CGCaATtGAA tCgGCAaGAC AATAT...ACG GaATCTTtCG tATtCATCAG GAA | 1055 |
| vanA | — | A CGCaATtGAA tCgGCAaGAC AATAT...ACG GaATCTTtCG tATtCATCAG GAA | 1056 |
| vanA | — | A CGCaATtGAA tCgGCAaGAC AATAT...ACG GaATCTTtCG tATtCATCAG GAA | 1057 |
| vanA | — | A CGCaATtGAA tCgGCAaGAC AATAT...ACG GaATCTTtCG tATtCATCAG GAA | 1049 |
| vanA | — | A CGCaATtGAA tCgGCAaGAC AATAT...ACG GaATCTTtCG tATtCATCAG GAA | 1050 |
| vanB | U94526 | C TGCGATAGAA GCgGCAGGAC AATAT...ACG GTATCTTCCG CATCCATCAG GAA | 1117 |
| vanB | U94527 | C TGCGATAGAA GCAGCAGGAC AATAT...ACG GTATCTTCCG CATCCATCAG GAA | — |
| vanB | U94528 | C TGCGATAGAA GCgGCAGGAC AATAT...ACG GTATCTTCCG CATCCATCAG GAA | — |
| vanB | U94529 | C TGCGATAGAA GCgGCAGGAC AATAT...ACG GTATCTTCCG CATCCATCAG GAA | — |
| vanB | U94530 | C TGCGATAGAA GCgGCAGGAC AATAT...ACG GTATCTTCCG CATCCATCAG GAA | — |
| vanB | Z83305 | C TGCGATAGAA GCgGCAGGAC AATAT...ACG GTATCTTCCG CATCCATCAG GAA | — |
| vanB | U81452 | C TGCGATAGAA GCgGCAGGAC AATAT...ACG GTATCTTCCG CATCCATCAG GAA | — |
| vanB | U35369 | C TGCGATAGAA GCAGCAGGAC AATAT...ACG GTATCTTCCG CATCCATCAG GAA | — |
| vanB | U72704 | C TGCGATAGAA GCgGCAGGAC AATAT...ATG GTATCTTCCG CATCCATCAG GAA | — |
| vanB | L06138 | C TGCGATAGAA GCAGCAGGAC AATAT...ACG GTATCTTCCG CATCCATCAG GAA | — |
| vanB | L15304 | C TGCGATAGAA GCgGCAGGAC AATAT...ACG GTATCTTCCG CATCCATCAG GAA | — |
| vanB | U00456 | C TGCGATAGAA GCAGCAGGAC AATAT...ACG GTATCTTCCG CATCCATCAG GAA | — |
| vanD | AF130997 | C AGCaATcGAA GaAGCAaGAa AATAT...ACG GctTtTTtaa gATtCATCAG GAA | — |
| vanE | AF136925 | A AGCaATAGAc GaAGCttcAa AATAT...ATG GctTtTTCga CtatgAagAG AAA | — |

| | | |
|---|---|---|
| Selected sequence for | CGATAGAA GCAGCAGGAC AA | 1095 |
| amplification primer | | |
| Selected sequence for | GTATCTTCCG CATCCATCAG | 1096 |
| amplification primer^{a} | | |

The sequence numbering refers to the Enterococcus faecium vanB gene fragment (SEQ ID NO. 1117). Nucleotides in capitals are identical to the selected sequences or match those sequences. Mismatches are indicated by lower-case letters. Dots indicate gaps in the sequences displayed.
^{a}This sequence is the reverse-complement of the above vanB sequence.

Annex XXX: Strategy for the selection of vanC-specific amplification primers from
vanC sequences.

| | Accession # | 929 957 1064 1092 | SEQ ID NO.: |
|---|---|---|---|
| vanC1 | — | GT CGACGGTTTT TTTGATTTTG AAGAGAA...ACGGGTC TGGCTCGAAT CGATTTTTTC GT | 1058 |
| vanC1 | — | GT CGACGGTTTT TTTGATTTTG AAGAGAA...ACGGGTC TGGCTCGAAT CGATTTTTTC GT | 1059 |
| vanC1 | M75132 | GT CGACGGTTTT TTTGATTTTG AAGAGAA...ACGGGTC TGGCTCGAAT CGATTTTTTC GT | 1138 |
| vanC2 | — | GT AGACGGCTTT TTCGATTTTG AAGAAAA...AAAGGTC TTGCTCGCAT CGACTTTTTT GT | 1060 |
| vanC2 | — | GT AGACGGCTTT TTCGATTTTG AAGAAAA...AAAGGTC TTGCTCGCAT CGACTTTTTT GT | 1061 |
| vanC2 | — | GT AGACGGCTTT TTCGATTTTG AAGAAAA...AAAGGTC TTGCTCGCAT CGACTTTTTT GT | 1062 |
| vanC2 | — | GT AGACGGCTTT TTCGATTTTG AAGAAAA...AAAGGTC TTGCTCGCAT CGACTTTTTT GT | 1063 |
| vanC2 | L29638 | GT AGACGGCTTT TTCGATTTTG AAGAAAA...AAAGGTC TTGCTCGCAT CGACTTTTTT GT | — |
| vanC2 | L29638 | GT AGACGGCTTT TTCGATTTTG AAGAAAA...AAAGGTC TTGCTCGCAT CGACTTTTTT GT | — |
| vanC3 | — | GT AGACGGCTTT TTCGATTTTG AAGAAAA...AAAGGTC TTGCTCGCAT CGACTTTTTT GT | 1064 |
| vanC3 | — | GT AGACGGCTTT TTCGATTTTG AAGAAAA...AAAGGTC TTGCTCGCAT CGACTTTTTT GT | 1065 |
| vanC3 | — | GT AGACGGCTTT TTCGATTTTG AAGAAAA...AAAGGaC TTGCTCGCAT CGACTTTTTT GT | 1066 |
| vanC3 | L29639 | GT AGACGGCTTT TTCGATTTTG AAGAAAA...AAAGGTC TTGCTCGCAT CGACTTTTTT GT | — |

| | | |
|---|---|---|
| Selected sequence | GACGGYTTT TTYGATTTTG AAGA | 1101 |
| for resistance primer | | |
| Selected sequence | GGTC TKGCTCGMAT CGAYTTTTT | 1102 |
| for resistance primer^{a} | | |

The sequence numbering refers to the vanC1 gene fragment (SEQ ID NO. 1138). Nucleotides in capitals are identical to the selected sequences or match those sequences. Mismatches are indicated by lower-case letters. Dots indicate gaps in the sequence displayed.
“R” “Y” “M” “K” “W” and “S” designate nucleotide positions which are degenerated. “R” stands for A or G; “Y” stands for C or T; “M” stands for A or C; “K” stands for G or T; “W” stands for A or T; “S” stands for C or G. “I” stands for inosine which is a nucleotide analog that can bind to any of the four nucleotides A, C, G or T.
^{a}This sequence is the reverse-complement of the selected sequence.

| Annex XXXI: Strategy for the selection of Streptococcus pneumoniae-specific | | | |
|---|---|---|---|
| amplification primers and hybridization probes from pbp1a sequences. | | | |
| | | | SEQ ID |
| | Accession # | 453 505 678 706 | NO.: |
| pbp1a | M90528 | A TTGACTAcCC AAGCATaCAc TATGCtAAtG CtATTTCAAG TAATACAACC GA...TATATG ATGACaGAtA TGATGAAAAC CGT... | — |
| pbp1a | X67873 | A TCGACTAcCC AAGtATtCAc TActCAAAtG CCATTTCAAG TAAcACAACC GA...TATATG ATGACCGAAA TGATGAAAAC AGT... | — |
| pbp1a | AB006868 | A TCGACTAcCC AAGtATtCAc TActCAAAtG CCATTTCAAG TAAcACAACC GA...TATATG ATGACCGACA TGATGAAAAC AGT... | — |
| pbp1a | AF046234 | A TCGACTAcCC AAGtATtCAc TActCAAAtG CCATTTCAAG TAAcACAACC GA...TATATG ATGACCGAAA TGATGAAAAC TGT... | — |
| pbp1a | | A TCGACTAcCC AAGtATtCAc TActCAAAtG CCATTTCAAG TAAcACAACC GA...TATATG ATGACCGACA TGATGAAAAC TGT... | 1014 |
| pbp1a | | A TCGACTAcCC AAGtATtCAc TActCAAAtG CCATTTCAAG TAAcACAACC GA...TACATG ATGACCGAAA TGATGAAAAC TGT... | 1017 |
| pbp1a | AB006873 | A TCGACTAcCC AAGtcTtCAc TActCAAAtG CCATTTCAAG TAAcACAACC GA...TATATG ATGACCGACA TGATGAAAAC AGT... | — |
| pbp1a | AF139883 | A TCGACTATCC AAGCATGCAT TATGCAAACG CCATTTCAAG TAATACAACA GA...TATATG ATGACCGACA TGATGAAAAC AGT... | 1169 |
| pbp1a | | A TCGACTATCC AAGCATGCAT TATGCAAACG CCATTTCAAG TAATACAACA GA...TATATG ATGACCGACA TGATGAAAAC AGT... | 1004 |
| pbp1a | | A TCGACTATCC AAGCATGCAT TATGCAAACG CCATTTCAAG TAATACAACA GA...TATATG ATGACCGACA TGATGAAAAC AGT... | 1007 |
| pbp1a | | A TCGACTATCC AAGCATGCAT TATGCAAACG CCATTTCAAG TAATACAACA GA...TATATG ATGACCGACA TGATGAAAAC AGT... | 1008 |
| pbp1a | | A TCGACTATCC AAGCATGCAT TATGCAAACG CCATTTCAAG TAATACAACA GA...TATATG ATGACCGACA TGATGAAAAC AGT... | 1009 |
| pbp1a | | A TCGACTATCC AAGCATGCAT TATGCAAACG CCATTTCAAG TAATACAACA GA...TATATG ATGACCGACA TGATGAAAAC AGT... | 1011 |
| pbp1a | AF159448 | A TCGACTATCC AAGCATGCAT TATGCAAACG CCATTTCAAG TAATACAACA GA...TATATG ATGACCGACA TGATGAAAAC AGT... | — |
| pbp1a | | A TCGACTATCC AAGCATGCAT TATGCAAACG CCATTTCAAG TAATACAACA GA...TACATG ATGACCGAAA TGATGAAAAC TGT... | 1005 |
| pbp1a | | A TCGACTATCC AAGCATGCAT TATGCAAACG CCATTTCAAG TAATACAACA GA...TACATG ATGACCGAAA TGATGAAAAC TGT... | 1015 |
| pbp1a | | A TCGACTATCC AAGCATGCAT TATGCAAACG CCATTTCAAG TAATACAACA GA...TACATG ATGACCGAAA TGATGAAAAC TGT... | 1006 |
| pbp1a | | A TCGACTATCC AAGCATGCAT TATGCAAACG CCATTTCAAG TAATACAACA GA...TACATG ATGACCGAAA TGATGAAAAC TGT... | 1012 |
| pbp1a | X67867 | A TCGACTATCC AAGCATGCAT TATGCAAACG CCATTTCAAG TAATACAACA GA...TACATG ATGACCGAAA TGATGAAAAC TGT... | — |
| pbp1a | | A TCGACTATCC AAGCATGCAT TATGCAAACG CCATTTCAAG TAAcACAACT GA...TATATG ATGACtGAAA TGATGAAAAC TGT... | 1010 |
| pbp1a | Z49094 | A TCGACTATCC AAGCATGCAT TATGCAAACG CCATTTCAAG TAAcACAACT GA...TATATG ATGACtGAAA TGATGAAAAC TGT... | — |
| pbp1a | | A TCGACTATCC AAGCATGCAT TATGCAAACG CCATTTCAAG TAAcACAACT GA...TATATG ATGACtGAAA TGATGAAAAC TGT... | 1013 |
| pbp1a | | A TCGACTATCC AAGCATGCAT TATGCAAACG CCATTTCAAG TAAcACAACT GA...TATATG ATGACtGAAA TGATGAAAAC TGT... | 1016 |
| pbp1a | X67870 | A TCGACTATCC AAGtATGCAT TAcGCAAACG CCATTTCAAG TAAcACAACT GA...TATATG ATGACCGAAA TGATGAAAAC TGT... | — |
| pbp1a | | A TTGACTATCC AAGtATtCAc TActCAAAtG CtATTTCAAG TAATACAACT GA...TATATG ATGACtGAAA TGATGAAAAC TGT... | 1018 |
| pbp1a | AJ002290 | A TTGAtTAcCC AActATGgtc TATGCtAACG CtATTTCAAG TAATACAACT GA...TACATG ATGACtGAAA TGATGAAAAC AGT... | — |
| pbp1a | X67871 | A TCGACTAcCC AAGtcTtCAc TActCAAAtG CCATTTCAAG TAAcACAACC GA...TACATG ATGACaGAAA TGATGAAAAC AGT... | — |

| | | |
|---|---|---|
| Selected sequences for amplification primers | GACTATCC AAGCATGCAT TATG | 1130 |
| | ATG ATGACHGAMA TGATGAAAAC | 1129 |
| Selected sequence for hybridization probe | CAAACG CCATTTCAAG TAATACAAC | 1197 |

| The sequence numbering refers to the Streptococcus pneumoniae pbp1a gene fragment (SEQ ID NO. 1004). | | | |
|---|---|---|---|
| Nucleotides in capitals are identical to the selected sequences or match those sequences. Mismatches are indicated | | | |
| by lower-case letters. Dotes indicate gaps in the sequences displayed. | | | |
| “R” “Y” “M” “K” “W” and “S” designate nucleotide positions which | | | |
| are degenerated. “R” stands for A or G; “Y” stands for C or T; “M” stands for A or C; | | | |
| “K” stands for G or T; “W” stands for A or T; “H” stands for A, C or T; “S” stands | | | |
| for C or G. “I” stands for inosine which is a nucleotide analog that can bind to any of the four nucleotides | | | |
| A, C, G or T. | | | |
| | | | SEQ ID |
| | Accession # | 756 783 813 840 | SEQ ID NO.: |
| pbp1a | M90528 | ...GCTGGTAA aACtGGTACg TCTaACTATA...A ATACgGGTTA TGTAGCTCCG GAcGAAA | — |
| pbp1a | X67873 | ...GCTGGTAA aACAGGaACc TCTAACTATA...A CCtCTcaaTt TGTAGCaCCt GATGAAC | — |
| pbp1a | AB006868 | ...GCTGGTAA aACAGGaACc TCTAACTATA...A CCtCTcaaTt TGTAGCaCCt GAcGAAC | — |
| pbp1a | AF046234 | ...GCAGGTAA aACAGGTACT TCTAACTATA...A ACACTGGTTA CGTAGCTCCA GATGAAA | — |
| pbp1a | | ...GCAGGTAA aACAGGTACT TCTAACTATA...A ACACTGGTTA CGTAGCTCCA GATGAAA | 1014 |
| pbp1a | | ...GCTGGTAA GACAGGTACT TCTAACTACA...A ACACTGGCTA TGTAGCTCCA GATGAAA | 1017 |
| pbp1a | AB006873 | ...GCAGGTAA GACAGGTACT TCTAACTATA...A ACACTGGCTA CGTAGCTCCA GATGAAA | — |
| pbp1a | AF139883 | ...GCTGGTAA aACAGGaACc TCTAACTATA...A ACACTGGCTA TGTAGCTCCA GATGAAA | 1169 |
| pbp1a | | ...GCTGGTAA aACAGGaACc TCTAACTATA...A ACACTGGCTA TGTAGCTCCA GATGAAA | 1004 |
| pbp1a | | ...GCTGGTAA aACAGGaACc TCTAACTATA...A ACACTGGCTA TGTAGCTCCA GATGAAA | 1007 |
| pbp1a | | ...GCTGGTAA aACAGGaACc TCTAACTATA...A ACACTGGCTA TGTAGCTCCA GATGAAA | 1008 |
| pbp1a | | ...GCTGGTAA aACAGGaACc TCTAACTATA...A ACACTGGCTA TGTAGCTCCA GATGAAA | 1009 |
| pbp1a | | ...GCTGGTAA aACAGGaACc TCTAACTATA...A ACACTGGCTA TGTAGCTCCA GATGAAA | 1011 |
| pbp1a | AF159448 | ...GCTGGTAA aACAGGaACc TCTAACTATA...A ACACTGGCTA TGTAGCTCCA GATGAAA | — |
| pbp1a | | ...GCTGGTAA GACAGGTACT TCTAACTACA...A ACACTGGCTA TGTAGCTCCA GATGAAA | 1005 |
| pbp1a | | ...GCTGGTAA GACAGGTACT TCTAACTACA...A ACACTGGCTA TGTAGCTCCA GATGAAA | 1015 |
| pbp1a | | ...GCTGGTAA GACAGGTACT TCTAACTACA...A ACACTGGCTA TGTAGCTCCA GATGAAA | 1006 |
| pbp1a | | ...GCTGGTAA GACAGGTACT TCTAACTACA...A ACACTGGCTA TGTAGCTCCA GATGAAA | 1012 |
| pbp1a | X67867 | ...GCTGGTAA GACAGGTACT TCTAACTACA...A ACACTGGCTA TGTAGCTCCA GATGAAA | — |
| pbp1a | | ...GCAGGTAA GACAGGTACT TCTAACTATA...A ACACTGGTTA CGTAGCTCCA GATGAAA | 1010 |
| pbp1a | Z49094 | ...GCAGGTAA GACAGGTACT TCTAACTATA...A ACACTGGTTA CGTAGCTCCA GATGAAA | — |
| pbp1a | | ...GCAGGTAA GACAGGTACT TCTAACTATA...A ACACTGGCTA CGTAGCTCCA GATGAAA | 1013 |
| pbp1a | | ...GCAGGTAA GACAGGTACT TCTAACTATA...A ACACTGGCTA CGTAGCTCCA GATGAAA | 1016 |
| pbp1a | X67870 | ...GCAGGTAA GACAGGTACT TCTAACTATA...A ACACTGGCTA CGTAGCTCCA GATGAAA | — |
| pbp1a | | ...GCAGGTAA GACAGGTACT TCTAACTATA...A ACACTGGCTA CGTAGCTCCA GATGAAA | 1018 |
| pbp1a | AJ002290 | ...GCAGGTAA GACgGGTACa TCTAACTACA...A ACACTGGCTA C~~~~~~~~~ ~~~~~~~ | — |
| pbp1a | X67871 | ...GCTGGTAA aACAGGTACc TCTAACTATA...A ACACTGGTTA CGTAGCTCCA GATGAAA | — |

| | | |
|---|---|---|
| Selected sequence for hybridization probe | GGTAA GACAGGTACT TCTAACT | 1193 |
| Selected sequence for amplification primer^{a} | ACTGGYTA YGTAGCTCCA GATG | 1131 |

The sequence numbering refers to the Streptococcus pneumoniae pbp1a gene fragment (SEQ ID NO. 1004).
Nucleotides in capitals are identical to the selected sequences or match those sequences. Mismatches are indicated
by lower-case letters. Dots indicate gaps in the sequences displayed.
“~” indicates incomplete sequence data.
“R” “Y” “W” and “S” designate nucleotide positions which are degenerated.
“R” stands for A or G; “Y” stands for C or T; “W” stands for A or T; “S” stands for
C or G. “I” stands for inosine which is a nucleotide analog that can bind to any of the four nucleotides A, C, G or T.
^{a}This sequence is the reverse-complement of the selected primer.

Annex XXXII: Specific and ubiquitous primers
for nucleic acid amplification (toxin sequences).

Originating
DNA fragment

| | | | |
|---|---|---|---|
| | | SEQ ID | Nucleotide |
| SEQ ID NO. | Nucleotide sequence | NO. | position |

Toxin gene: cdtA

| | | | |
|---|---|---|---|
| 2123 | 5′-TCT ACC ACT GAA GCA TTA C | 2129^{a} | 442-460 |
| 2124^{b} | 5′-TAG GTA CTG TAG GTT TAT TG | 2129^{a} | 580-599 |

Toxin gene: cdtB

| | | | |
|---|---|---|---|
| 2126 | 5′-ATA TCA GAG ACT GAT GAG | 2130^{a} | 2665-2682 |
| 2127^{b} | 5′-TAG CAT ATT CAG AGA ATA TTG T | 2130^{a} | 2746-2767 |

Toxin gene: stx₁

| | | | |
|---|---|---|---|
| 1081 | 5′-ATG TCA GAG GGA TAG ATC CA | 1076^{a} | 233-252 |
| 1080^{b} | 5′-TAT AGC TAC TGT CAC CAG ACA ATG T | 1076^{a} | 394-418 |

Toxin gene: stx₂

| | | | |
|---|---|---|---|
| 1078 | 5′-AGT TCT GCG TTT TGT CAC TGT C | 1077^{a} | 546-567 |
| 1079^{b} | 5′-CGG AAG CAC ATT GCT GAT T | 1077^{a} | 687-705 |

Toxin genes: stx₁, and stx₂

| | | | |
|---|---|---|---|
| 1082 | 5′-TTG ARC RAA ATA ATT TAT ATG TG | 1076^{a} | 278-300 |
| 1083^{b} | 5′-TGA TGA TGR CAA TTC AGT AT | 1076^{a} | 781-800 |

^{a}Sequences from databases.
^{b}These sequences are from the complementary DNA strand of the sequence of the originating fragment given in the Sequence Listing.

Annex XXXIII: Molecular beacon internal hybridization probes for
specific detection of toxin sequences.

Originating
DNA fragment

| | | | |
|---|---|---|---|
| | | SEQ ID | Nucleotide |
| SEQ ID NO. | Nucleotide sequence^{a} | NO. | position |

Toxin gene: cdtA

| | | | |
|---|---|---|---|
| 2125^{b} | 5′-CAC GCG GAT TTT GAA TCT CTT CCT CTA | 2129^{c} | 462-488 |
| | GTA GCG CGT G | | |

Toxin gene: cdtB

| | | | |
|---|---|---|---|
| 2128 | 5′-CAA CGC TGG AGA ATC TAT ATT TGT AGA | 2130^{c} | 2714-2740 |
| | AAC TGC GTT G | | |

Toxin gene: stx₁

| | | | |
|---|---|---|---|
| 1084 | 5′-CCA CGC CGC TTT GCT GAT TTT TCA CAT | 1076^{c} | 337-363 |
| | GTT ACC GCG TGG | | |
| 2012^{d} | 5′-CCG CGG ATT ATT AAA CCG CCC TTC CGC | 1076^{c} | 248-264 |
| | GG-MR-HEG-ATG TCA GAG GGA TAG ATC CA | | |

Toxin gene: stx₂

| | | | |
|---|---|---|---|
| 1085 | 5′-CCA CGC CAC TGT CTG AAA CTG CTC CTG | 1077^{c} | 617-638 |
| | TG CGT GG | | |

^{a}Underlined nucleotides indicate the molecular beacon's stem.
^{b}These sequences are from the complementary DNA strand of the sequence of the originating fragment given in the Sequence Listing.
^{c}Sequences from databases.
^{d}Scorpion primer.

Annex XXXIV: Specific and ubiquitous primers for nucleic acid
amplification (van sequences).

Originating DNA fragment

| | | | |
|---|---|---|---|
| | | SEQ ID | Nucleotide |
| SEQ ID NO. | Nucleotide sequence | NO. | position |

Resistance gene: vanA

| | | | |
|---|---|---|---|
| 1086 | 5′-CTA CTC CCG CCT TTT GGG TT | 1049-1057^{a} | 513-532^{b} |
| 1087^{c} | 5′-CTC ACA GCC CGA AAC AGC CT | 1049-1057^{a} | 699-718^{b} |
| 1086 | 5′-CTA CTC CCG CCT TTT GGG TT | 1049-1057^{a} | 513-532^{b} |
| 1088^{c} | 5′-TGC CGT TTC CTG TAT CCG TC | 1049-1057^{a} | 885-904^{b} |
| 1086 | 5′-CTA CTC CCG CCT TTT GGG TT | 1049-1057^{a} | 513-532^{b} |
| 1089^{c} | 5′-ATC CAC ACG GGC TAG ACC TC | 1049-1057^{a} | 933-952^{b} |
| 1090 | 5′-AAT AGC GCG GAC GAA TTG GAC | 1049-1057^{a} | 629-649^{b} |
| 1091^{c} | 5′-AAC GCG GCA CTG TTT CCC AA | 1049-1057^{a} | 734-753^{b} |
| 1090 | 5′-AAT AGC GCG GAC GAA TTG GAC | 1049-1057^{a} | 629-649^{b} |
| 1089^{c} | 5′-ATC CAC ACG GGC TAG ACC TC | 1049-1057^{a} | 933-952^{b} |
| 1092 | 5′-TCG GCA AGA CAA TAT GAC AGC | 1049-1057^{a} | 662-682^{b} |
| 1088^{c} | 5′-TGC CGT TTC CTG TAT CCG TC | 1049-1057^{a} | 885-904^{b} |

Resistance gene: vanB

| | | | |
|---|---|---|---|
| 1095 | 5′-CGA TAG AAG CAG CAG GAC AA | 1117^{d} | 473-492 |
| 1096^{c} | 5′-CTG ATG GAT GCG GAA GAT AC | 1117^{d} | 611-630 |

Resistance genes: vanA, vanB

| | | | |
|---|---|---|---|
| 1112 | 5′-GGC TGY GAT ATT CAA AGC TC | 1049-1057, 1117^{a} | 437-456^{b} |
| 1113^{c} | 5′-ACC GAC CTC ACA GCC CGA AA | 1049-1057, 1117^{a} | 705-724^{b} |
| 1112 | 5′-GGC TGY GAT ATT CAA AGC TC | 1049-1057, 1117^{a} | 437-456^{b} |
| 1114^{c} | 5′-TCW GAG CCT TTT TCC GGC TCG | 1049-1057, 1117^{a} | 817-837^{b} |
| 1115 | 5′-TTT CGG GCT GTG AGG TCG GBT GHG CG | 1049-1057, 1117^{a} | 705-730^{b} |
| 1114^{c} | 5′-TCW GAG CCT TTT TCC GGC TCG | 1049-1057, 1117^{a} | 817-837^{b} |
| 1116 | 5′-TTT CGG GCT GTG AGG TCG GBT GHG CGG | 1049-1057, 1117^{a} | 705-731^{b} |
| 1114^{c} | 5′-TCW GAG CCT TTT TCC GGC TCG | 1049-1057, 1117^{a} | 817-837^{b} |
| 1112 | 5′-GGC TGY GAT ATT CAA AGC TC | 1049-1057, 1117^{a} | 437-456^{b} |
| 1118^{c} | 5′-TTT TCW GAG CCT TTT TCC GGC TCG | 1049-1057, 1117^{a} | 817-840^{b} |

^{a}These sequences were aligned to derive the corresponding primer.
^{b}The nucleotide positions refer to the vanA sequence fragment (SEQ ID NO. 1051).
^{c}These sequences are from the complementary DNA strand of the sequence of the
originating fragment given in the Sequence Listing.
^{d}Sequences from databases.

Originating DNA fragment

| | | SEQ ID | Nucleotide |
|---|---|---|---|
| SEQ ID NO. | Nucleotide sequence | NO. | position |
| 1115 | 5′-TTT CGG GCT GTG AGG TCG GBT GHG CG | 1049-1057, 1117^{a} | 705-730^{b} |
| 1118^{c} | 5′-TTT TCW GAG CCT TTT TCC GGC TCG | 1049-1057, 1117^{a} | 817-840^{b} |
| 1116 | 5′-TTT CGG GCT GTG AGG TCG GBT GHG CGG | 1049-1057, 1117^{a} | 705-731^{b} |
| 1118^{c} | 5′-TTT TCW GAG CCT TTT TCC GGC TCG | 1049-1057, 1117^{a} | 817-840^{b} |
| 1119 | 5′-TTT CGG GCT GTG AGG TCG GBT GHG C | 1049-1057, 1117^{a} | 705-729^{b} |
| 1118^{c} | 5′-TTT TCW GAG CCT TTT TCC GGC TCG | 1049-1057, 1117^{a} | 817-840^{b} |
| 1120 | 5′-TTT CGG GCT GTG AGG TCG GBT GHG | 1049-1057, 1117^{a} | 705-728^{b} |
| 1118^{c} | 5′-TTT TCW GAG CCT TTT TCC GGC TCG | 1049-1057, 1117^{a} | 817-840^{b} |
| 1121 | 5′-TGT TTG WAT TGT CYG GYA TCC C | 1049-1057, 1117^{a} | 408-429^{b} |
| 1111^{c} | 5′-CTT TTT CCG GCT CGW YTT CCT GAT G | 1049-1057, 1117^{a} | 806-830^{b} |
| 1112 | 5′-GGC TGY GAT ATT CAA AGC TC | 1049-1057, 1117^{a} | 437-456^{b} |
| 1111^{c} | 5′-CTT TTT CCG GCT CGW YTT CCT GAT G | 1049-1057, 1117^{a} | 806-830^{b} |
| 1123 | 5′-TTT CGG GCT GTG AGG TCG GBT G | 1049-1057, 1117^{a} | 705-726^{b} |
| 1111^{c} | 5′-CTT TTT CCG GCT CGW YTT CCT GAT G | 1049-1057, 1117^{a} | 806-830^{b} |
| 1112 | 5′-GGC TGY GAT ATT CAA AGC TC | 1049-1057, 1117^{a} | 437-456^{b} |
| 1124^{c} | 5′-GAT TTG RTC CAC YTC GCC RAC A | 1049-1057, 1117^{a} | 757-778^{b} |

Resistance gene: vanC1

| | | | |
|---|---|---|---|
| 1103 | 5′-ATC CCG CTA TGA AAA CGA TC | 1058-1059^{a} | 519-538^{d} |
| 1104^{c} | 5′-GGA TCA ACA CAG TAG AAC CG | 1058-1059^{a} | 678-697^{d} |

Resistance genes: vanC1, vanC2, vanC3

| | | | |
|---|---|---|---|
| 1097 | 5′-TCY TCA AAA GGG ATC ACW AAA GTM AC | 1058-1066^{a} | 607-632^{d} |
| 1098^{c} | 5′-TCT TCA AAA TCG AAA AAG CCG TC | 1058-1066^{a} | 787-809^{d} |
| 1099 | 5′-TCA AAA GGG ATC ACW AAA GTM AC | 1058-1066^{a} | 610-632^{d} |
| 1100^{c} | 5′-GTA AAK CCC GGC ATR GTR TTG ATT TC | 1058-1066^{a} | 976-1001^{d} |
| 1101 | 5′-GAC GGY TTT TTY GAT TTT GAA GA | 1058-1066^{a} | 787-809^{d} |
| 1102^{c} | 5′-AAA AAR TCG ATK CGA GCM AGA CC | 1058-1066^{a} | 922-944^{d} |

Resistance genes: vanC2, vanC3

| | | | |
|---|---|---|---|
| 1105 | 5′-CTC CTA CGA TTC TCT TGA YAA ATC A | 1060-1066, 1140^{a} | 487-511^{e} |
| 1106^{c} | 5′-CAA CCG ATC TCA ACA CCG GCA AT | 1060-1066, 1140^{a} | 690-712^{e} |

^{a}These sequences were aligned to derive the corresponding primer.
^{b}The nucleotide positions refer to the vanA sequence fragment (SEQ ID NO. 1051).
^{c}These sequences are from the complementary DNA strand of the sequence of the
originating fragment given in the Sequence Listing.
^{d}The nucleotide positions refer to the vanC1 sequence fragment (SEQ ID NO. 1058).
^{e}The nucleotide positions refer to the vanC2 sequence fragment (SEQ ID NO. 1140).

Originating DNA fragment

| | | | |
|---|---|---|---|
| | | SEQ ID | Nucleotide |
| SEQ ID NO. | Nucleotide sequence | NO. | position |

Resistance gene: vanD

| | | | |
|---|---|---|---|
| 1591 | 5′-ATG AGG TAA TAG AAC GGA TT | 1594 | 797-837 |
| 1592^{b} | 5′-CAG TAT TTC AGT AAG CGT AAA | 1594 | 979-999 |

Resistance gene: vanE

| | | | |
|---|---|---|---|
| 1595 | 5′-AAA TAA TGC TCC ATC AAT TTG CTG A | 1599^{a} | 74-98 |
| 1596^{b} | 5′-ATA GTC GAA AAA GCC ATC CAC AAG | 1599^{a} | 394-417 |
| 1597 | 5′-GAT GAA TTT GCG AAA ATA CAT GGA | 1599^{a} | 163-186 |
| 1598^{b} | 5′-CAG CCA ATT TCT ACC CCT TTC AC | 1599^{a} | 319-341 |

Sequencing primers (vanAB)

| | | | |
|---|---|---|---|
| 1112 | 5′-GGC TGY GAT ATT CAA AGC TC | 1139^{a} | 737-756 |
| 1111^{b} | 5′-CTT TTT CCG GCT CGW YTT CCT GAT G | 1139^{a} | 1106-1130 |

Sequencing primers (vanA, vanX, vanY)

| | | | |
|---|---|---|---|
| 1150 | 5′-TGA TAA TCA CAC CGC ATA CG | 1141^{a} | 860-879 |
| 1151^{b} | 5′-TGC TGT CAT ATT GTC TTG CC | 1141^{a} | 1549-1568 |
| 1152 | 5′-ATA AAG ATG ATA GGC CGG TG | 1141^{a} | 1422-1441 |
| 1153^{b} | 5′-CTC GTA TGT CCC TAC AAT GC | 1141^{a} | 2114-2133 |
| 1154 | 5′-GTT TGA AGC ATA TAG CCT CG | 1141^{a} | 2520-2539 |
| 1155^{b} | 5′-CAG TGC TTC ATT AAC GTA GTC | 1141^{a} | 3089-3109 |

Sequencing primers (vanC1)

| | | | |
|---|---|---|---|
| 1110 | 5′-ACG AGA AAG ACA ACA GGA AGA CC | 1138^{a} | 122-144 |
| 1109^{b} | 5′-ACA TCG TGA TCG CTA AAA GGA GC | 1138^{a} | 1315-1337 |

Sequencing primers (vanC2, vanC3)

| | | | |
|---|---|---|---|
| 1108 | 5′-GTA AGA ATC GGA AAA GCG GAA GG | 1140^{a} | 1-23 |
| 1107^{b} | 5′-CTC ATT TGA CTT CCT CCT TTG CT | 1140^{a} | 1064-1086 |

^{a}Sequences from databases.
^{b}These sequences are from the complementary DNA strand of the sequence of
the originating fragment given in the Sequence Listing.

Annex XXXV: Internal hybridization probes for
specific detection of van sequences.

Originating
DNA fragment

| | | | |
|---|---|---|---|
| | | SEQ ID | Nucleotide |
| SEQ ID NO. | Nucleotide sequence | NO. | position |

Resistance gene: vanA

| | | | |
|---|---|---|---|
| 1170 | 5′-ACG AAT TGG ACT ACG CAA TT | 1049-1057^{a} | 639-658^{b} |
| 2292 | 5′-GAA TCG GCA AGA CAA TAT G | 2293^{c} | 583-601 |

Resistance gene: vanB

| | | | |
|---|---|---|---|
| 1171 | 5′-ACG AGG ATG ATT TGA TTG TC | 1117^{c} | 560-579 |
| 2294 | 5′-AAA CGA GGA TGA TTT GAT TG | 2296^{a} | 660-679 |
| 2295 | 5′-TTG AGC AAG CGA TTT CGG | 2296^{a} | 614-631 |

Resistance gene: vanD

| | | | |
|---|---|---|---|
| 2297 | 5′-TTC AGG AGG GGG ATC GC | 1594^{c} | 458-474 |

^{a}These sequences were aligned to derive the corresponding primer.
^{b}The nucleotide positions refer to the vanA sequence fragment (SEQ ID NO. 1051).
^{c}Sequences from databases.

Annex XXXVI: Specific and ubiquitous primers for nucleic acid
amplification (pbp sequences).

Originating
DNA fragment

| | | | |
|---|---|---|---|
| | | SEQ ID | Nucleotide |
| SEQ ID NO. | Nucleotide sequence | NO. | position |

Resistance gene: pbp1a

| | | | |
|---|---|---|---|
| 1129 | 5′-ATG ATG ACH GAM ATG ATG AAA AC | 1004-1018^{a} | 681-703^{b} |
| 1131^{c} | 5′-CAT CTG GAG CTA CRT ARC CAG T | 1004-1018^{a} | 816-837^{b} |
| 1130 | 5′-GAC TAT CCA AGC ATG CAT TAT G | 1004-1018^{a} | 456-477^{b} |
| 1131 | 5′-CAT CTG GAG CTA CRT ARC CAG T | 1004-1018^{a} | 816-837^{b} |
| 2015 | 5′-CCA AGA AGC TCA AAA ACA TCT G | 2047^{d} | 909-930 |
| 2016^{c} | 5′-TAD CCT GTC CAW ACA GCC AT | 2047^{d} | 1777-1796 |

Sequencing primers (pbp1a)

| | | | |
|---|---|---|---|
| 1125 | 5′-ACT CAC AAC TGG GAT GGA TG | 1169^{d} | 873-892 |
| 1126^{c} | 5′-TTA TGG TTG TGC TGG TTG AGG | 1169^{d} | 2140-2160 |
| 1125 | 5′-ACT CAC AAC TGG GAT GGA TG | 1169^{d} | 873-892 |
| 1128^{c} | 5′-GAC GAC YTT ATK GAT ATA CA | 1169^{d} | 1499-1518 |
| 1127 | 5′-KCA AAY GCC ATT TCA AGT AA | 1169^{d} | 1384-1403 |
| 1126^{c} | 5′-TTA TGG TTG TGC TGG TTG AGG | 1169^{d} | 2140-2160 |

Sequencing primers (pbp2b)

| | | | |
|---|---|---|---|
| 1142 | 5′-GAT CCT CTA AAT GAT TCT CAG GTG G | 1172^{d} | 1-25 |
| 1143^{c} | 5′-CAA TTA GCT TAG CAA TAG GTG TTG G | 1172^{d} | 1481-1505 |
| 1142 | 5′-GAT CCT CTA AAT GAT TCT CAG GTG G | 1172^{d} | 1-25 |
| 1145^{c} | 5′-AAC ATA TTK GGT TGA TAG GT | 1172^{d} | 793-812 |
| 1144 | 5′-TGT YTT CCA AGG TTC AGC TC | 1172^{d} | 657-676 |
| 1143^{c} | 5′-CAA TTA GCT TAG CAA TAG GTG TTG G | 1172^{d} | 1481-1505 |

Sequencing primers (pbp2x)

| | | | |
|---|---|---|---|
| 1146 | 5′-GGG ATT ACC TAT GCC AAT ATG AT | 1173^{d} | 219-241 |
| 1147^{c} | 5′-AGC TGT GTT AGC VCG AAC ATC TTG | 1173^{d} | 1938-1961 |
| 1146 | 5′-GGG ATT ACC TAT GCC AAT ATG AT | 1173^{d} | 219-241 |
| 1149^{c} | 5′-TCC YAC WAT TTC TTT TTG WG | 1173^{d} | 1231-1250 |
| 1148 | 5′-GAC TTT GTT TGG CGT GAT AT | 1173^{d} | 711-730 |
| 1147^{c} | 5′-AGC TGT GTT AGC VCG AAC ATC TTG | 1173^{d} | 1938-1961 |

^{a}These sequences were aligned to derive the corresponding primer.
^{b}The nucleotide positions refer to the pbp1a sequence fragment (SEQ ID NO. 1004).
^{c}These sequences are from the complementary DNA strand of the sequence of the originating fragment given in the Sequence Listing.
^{d}Sequences from databases.

Annex XXXVII: Internal hybridization probes for specific detection
of pbp sequences.

Originating
DNA fragment

| | | | |
|---|---|---|---|
| | | SEQ ID | Nucleotide |
| SEQ ID NO. | Nucleotide sequence | NO. | position |

Resistance gene: pbp1a

| | | | |
|---|---|---|---|
| 1132 | 5′-AGT GAA AAR ATG GCT GCT GC | 1004-1018^{a} | 531-550^{b} |
| 1133 | 5′-CAT CAA GAA CAC TGG CTA YGT AG | 1004-1018^{a} | 806-828^{b} |
| 1134 | 5′-CTA GAT AGA GCT AAA ACC TTC CT | 1004-1018^{a} | 417-439^{b} |
| 1135 | 5′-CAT TAT GCA AAC GCC ATT TCA AG | 1004-1018^{a} | 471-493^{b} |
| 1192 | 5′-GGT AAA ACA GGA ACC TCT AAC T | 1004-1018^{a} | 759-780^{b} |
| 1193 | 5′-GGT AAG ACA GGT ACT TCT AAC T | 1004-1018^{a} | 759-780^{b} |
| 1194 | 5′-CAT TTC AAG TAA TAC AAC AGA ATC | 1004-1018^{a} | 485-508^{b} |
| 1195 | 5′-CAT TTC AAG TAA CAC AAC TGA ATC | 1004-1018^{a} | 485-508^{b} |
| 1196 | 5′-GCC ATT TCA AGT AAT ACA ACA GAA | 1004-1018^{a} | 483-506^{b} |
| 1197 | 5′-CAA ACG CCA TTT CAA GTA ATA CAA C | 1004-1018^{a} | 478-502^{b} |
| 1094 | 5′-GGT AAA ACA GGT ACT TCT AAC TA | 1004-1018^{a} | 759-781^{b} |
| 1214 | 5′-GGT AAA ACA GGT ACC TCT AAC TA | 1004-1018^{a} | 759-781^{b} |
| 1216 | 5′-GGT AAG ACT GGT ACA TCA AAC TA | 1004-1018^{a} | 759-781^{b} |
| 1217 | 5′-CAA ATG CCA TTT CAA GTA ACA CAA C | 1004-1018^{a} | 478-502^{b} |
| 1218 | 5′-CAA ACG CCA TTT CAA GTA ACA CAA C | 1004-1018^{a} | 478-502^{b} |
| 1219 | 5′-CAA ATG CTA TTT CAA GTA ATA CAA C | 1004-1018^{a} | 478-502^{b} |
| 1220 | 5′-CAA ACG CCA TTT CAA GTA ATA CGA C | 1004-1018^{a} | 478-502^{b} |
| 2017 | 5′-ACT TTG AAT AAG GTC GGT CTA G | 2047^{c} | 1306-1327 |
| 2018 | 5′-ACA CTA AAC AAG GTT GGT TTA G | 2063 | 354-375 |
| 2019 | 5′-ACA CTA AAC AAG GTC GGT CTA G | 2064 | 346-367 |
| 2020 | 5′-GTA GCT CCA GAT GAA ATG TTT G | 2140^{c} | 1732-1753 |
| 2021 | 5′-GTA GCT CCA GAC GAA ATG TTT G | 2057 | 831-852 |
| 2022 | 5′-GTA GCT CCA GAT GAA ACG TTT G | 2053^{c} | 805-826 |
| 2023 | 5′-GTA ACT CCA GAT GAA ATG TTT G | 2056 | 819-840 |
| 2024 | 5′-AGT GAA AAG ATG GCT GCT GC | 2048^{c} | 1438-1457 |
| 2025 | 5′-AGT GAG AAA ATG GCT GCT GC | 2047^{c} | 1438-1457 |
| 2026 | 5′-TCC AAG CAT GCA TTA TGC AAA CG | 2047^{c} | 1368-1390 |
| 2027 | 5′-TCG GTC TAG ATA GAG CTA AAA CG | 2047^{c} | 1319-1341 |
| 2028 | 5′-TAT GCT CTT CAA CAA TCA CG | 2047^{c} | 1267-1286 |
| 2029 | 5′-AGC CGT TGA GAC TTT GAA TAA G | 2047^{c} | 1296-1317 |
| 2030 | 5′-CTT AAT GGT CTT GGT ATC G | 2047^{c} | 1345-1366 |
| 2031 | 5′-CGT GAC TGG GGT TCT GCT ATG A | 2049^{c} | 1096-1117 |
| 2032 | 5′-CGT GAC TGG GGA TCA TCA ATG A | 2047^{c} | 1096-1117 |
| 2033 | 5′-CGT GAC TGG GGT TCT GCC ATG A | 2057 | 195-216 |
| 2034 | 5′-ATC AAG AAC ACT GGC TAT GTA G | 2050^{c} | 787-808 |
| 2035 | 5′-ATC AAG AAC ACT GGC TAC GTA G | 2051^{c} | 787-808 |
| 2036 | 5′-ATC AAG AAC ACT GGT TAC GTA G | 2047 | 1714-1735 |
| 2037 | 5′-ATC AAA AAT ACT GGT TAT GTA G | 2057 | 813-834 |
| 2038 | 5′-ATC AAG AAT ACT GGC TAC GTA G | 2052^{c} | 757-778 |
| 2039 | 5′-ATC AAA AAC ACT GGC TAT GTA G | 2053^{c} | 787-808 |

^{a}These sequences were aligned to derive the corresponding primer.
^{b}The nucleotide positions refer to the pbp1a sequence fragment (SEQ ID NO. 1004).
^{c}Sequence from databases.

Annex XXXVIII: Strategy for the selection of vanAB-specific amplification primers and
vanA- and vanB-specific hybridization probes from van sequences.

| | | | SEQ |
|---|---|---|---|
| | | | ID |
| | Accession # | 734 759 936 961 | NO.: |
| vanA | X56895 | GTAGGCT GCGATATTCA AAGCTCAGC...CGGAACGAATT GGACTACGCA ATTGAA... | 1139 |
| vanA | M97297 | GTAGGCT GCGATATTCA AAGCTCAGC...CGGAACGAATT GGACTACGCA ATTGAA... | 1141 |
| vanA | | GTAGGCT GCGATATTCA AAGCTCAGC...CGGAACGAATT GGACTACGCA ATTGAA... | 1051 |
| vanA | | GTAGGCT GCGATATTCA AAGCTCAGC...CGGAACGAATT GGACTACGCA ATTGAA... | 1052 |
| vanA | | GTAGGCT GCGATATTCA AAGCTCAGC...CGGAACGAATT GGACTACGCA ATTGAA... | 1053 |
| vanA | | GTAGGCT GCGATATTCA AAGCTCAGC...CGGAACGAATT GGACTACGCA ATTGAA... | 1054 |
| vanA | | GTAGGCT GCGATATTCA AAGCTCAGC...CGGAACGAATT GGACTACGCA ATTGAA... | 1055 |
| vanA | | GTAGGCT GCGATATTCA AAGCTCAGC...CGGAACGAATT GGACTACGCA ATTGAA... | 1056 |
| vanA | | GTAGGCT GCGATATTCA AAGCTCAGC...CGGAACGAATT GGACTACGCA ATTGAA... | 1057 |
| vanA | | GTAGGCT GCGATATTCA AAGCTCAGC...CGGAACGAATT GGACTACGCA ATTGAA... | 1049 |
| vanA | | GTAGGCT GCGATATTCA AAGCTCAGC...CGGAACGAATT GGACTACGCA ATTGAA... | 1050 |
| vanB | U94526 | GTGGGCT GTGATATTCA AAGCTCCGC...CGGAaGAAcT taACgctGCg ATaGAA... | 1117 |
| vanB | U94527 | GTAGGCT GCGATATTCA AAGCTCCGC...CGGAaGAAcT aaACgctGCg ATaGAA... | — |
| vanB | U94528 | GTGGGCT GTGATATTCA AAGCTCCGC...CGGAaGAAcT taACgctGCg ATaGAA... | — |
| vanB | U94529 | GTGGGCT GTGATATTCA AAGCTCCGC...CGGAaGAAcT taACgctGCg ATaGAA... | — |
| vanB | U94530 | GTGGGCT GTGATATTCA AAGCTCCGC...CGGAaGAAcT taACgctGCg ATaGAA... | — |
| vanB | Z83305 | GTGGGCT GTGATATTCA AAGCTCCGC...CGGAaGAAcT taACgctGCg ATaGAA... | — |
| vanB | U81452 | GTGGGCT GTGATATTCA AAGCTCCGC...CGGAaGAAcT taACgctGCg ATaGAA... | — |
| vanB | U35369 | GTAGGCT GCGATATTCA AAGCTCCGC...CGGAaGAAcT aaACgctGCg ATaGAA... | — |
| vanB | U72704 | GTGGGCT GCGATATTCA AAGCTCCGC...CGGAaGAAcT taACgctGCg ATaGAA... | — |
| vanB | L06138 | GTAGGCT GCGATATTCA AAGCTCCGC...CGGAaGAAcT aaACgctGCg ATaGAA... | — |
| vanB | L15304 | GTGGGCT GTGATATTCA AAGCTCCGC...CGGAaGAAcT taACgctGCg ATaGAA... | — |
| vanB | U00456 | GTAGGCT GCGATATTCA AAGCTCCGC...CGGAaGAAcT aaACgctGCg ATaGAA... | — |
| vanD | AF130997 | GTGGGaT GCGATATTCA AAGCTCCGT...CAGAaGAAcT GcAggcaGCA ATcGAA... | — |
| vanE | AF136925 | GTAGGtT GTGgTATcgg AgctgCAGC...AAAgtGAtTT atAtaAaGCA ATaGAC... | — |

| | | |
|---|---|---|
| Selected sequence | GGCT GYGATATTCA AAGCTC | 1112 |
| for amplification | | |
| primer | | |
| Selected sequence | ACGAATT GGACTACGCA ATT (vanA) | 1170 |
| for hybridization | | |
| probe | | |

The sequence numbering refers to the Enterococcus faecium vanA gene fragment (SEQ ID NO. 1139).
Nucleotides in capitals are identical to the selected sequences or match those sequences.
Mismatches are indicated by lower-case letters. Dots indicate gaps in the sequences displayed.
“R” “Y” “M” “K” “W” and “S” designate
nucleotide positions which are degenerated. “R” stands for A or G; “Y” stands
for C or T; “M” stands for A or C; “K” stands for G or T; “W” stands for A or T;
“S” stands for C or G. “I” stands for inosine which is a nucleotide
analog that can bind to any of the four nucleotides A, C, G or T.

| | | | SEQ |
|---|---|---|---|
| | | | ID |
| | Accession # | 1038 1063 1103 1133 | NO.: |
| vanA | X56895 | GAAACagt GccGcGTTag TTGTtGGC...ATT CATCAGGAAG TCGAGCCGGA AAAAGGCT | 1139 |
| vanA | M97297 | GAAACagt GccGcgTTag TTGTtGGC...ATT CATCAGGAAG TCGAGCCGGA AAAAGGCT | 1141 |
| vanA | | GAAACagt GccGcgTTag TTGTtGGC...ATT CATCAGGAAG TCGAGCCGGA AAAAGGCT | 1051 |
| vanA | | GAAACagt GccGcgTTag cTGTtGGC...ATT CATCAGGAAG TCGAGCCGGA AAAAGGCT | 1052 |
| vanA | | GAAACagt GccGcgTTag cTGTtGGC...ATT CATCAGGAAG TCGAGCCGGA AAAAGGCT | 1053 |
| vanA | | GAAACagt GccGcgTTag TTGTtGGC...ATT CATCAGGAAG TCGAGCCGGA AAAAGGCT | 1054 |
| vanA | | GAAACagt GccGcgTTag cTGTtGGC...ATT CATCAGGAAG TCGAGCCGGA AAAAGGCT | 1055 |
| vanA | | GAAACagt GccGcgTTag cTGTtGGC...ATT CATCAGGAAG TCGAGCCGGA AAAAGGCT | 1056 |
| vanA | | GAAACagt GccGcgTTag cTGTtGGC...ATT CATCAGGAAG TCGAGCCGGA AAAAGGCT | 1057 |
| vanA | | GAAACagt GccGcgTTag cTGTtGGC...ATT CATCAGGAAG TCGAGCCGGA AAAAGGCT | 1049 |
| vanA | | GAAACagt GccGcgTTag cTGTtGGC...ATT CATCAGGAAG TCGAGCCGGA AAAAGGCT | 1050 |
| vanB | U94526 | GGAACGAG GATGATTTGA TTGTCGGC...ATC CATCAGGAAA ACGAGCCGGA AAAAGGCT | 1117 |
| vanB | U94527 | GAAACGAG GATGATTTGA TTGTCGGC...ATC CATCAGGAAA ACGAGCCGGA AAAAGGCT | — |
| vanB | U94528 | GGAACGAG GATGATTTGA TTGTCGGC...ATC CATCAGGAAA ACGAGCCGGA AAAAGGCT | — |
| vanB | U94529 | GGAACGAG GATGATTTGA TTGTCGGC...ATC CATCAGGAAA ACGAGCCGGA AAAAGGCT | — |
| vanB | U94530 | GGAACGAG GATGATTTGA TTGTCGGC...ATC CATCAGGAAA ACGAGCCGGA AAAAGGCT | — |
| vanB | Z83305 | GGAACGAG GATGATTTGA TTGTCGGC...ATC CATCAGGAAA ACGAGCCGGA AAAAGGCT | — |
| vanB | U81452 | GGAACGAG GATGATTTGA TTGTCGGC...ATC CATCAGGAAA ACGAGCCGGA AAAAGGCT | — |
| vanB | U35369 | GAAACGAG GATGATTTGA TTGTCGGC...ATC CATCAGGAAA ACGAGCCGGA AAAAGGCT | — |
| vanB | U72704 | GGAACGAG GATGATTTGA TTGTCGGC...ATC CATCAGGAAA ACGAGCCGGA AAAAGGAT | — |
| vanB | L06138 | GAAACGAG GATGATTTGA TTGTCGGC...ATC CATCAGGAAA ACGAGCCGGA AAAAGGCT | — |
| vanB | L15304 | GGAACGAG GATGATTTGA TTGTCGGC...ATC CATCAGGAAA ACGAGCCGGA AAAAGGCT | — |
| vanB | U00456 | GAAACGAG GATGATTTGA TTGTCGGC...ATC CATCAGGAAA ACGAGCCGGA AAAAGGCT | — |
| vanD | AF130997 | GAAACGga aATGATcTcA TgGctGGC...ATT CATCAGGAAG cacAGCCGGA aAAGGGAT | — |
| vanE | AF136925 | GGAA...t GAacAaTTGg TcGTtGGA...TAT gAagAGaAAt ACaA...... ......TT | — |

| | | |
|---|---|---|
| Selected sequence | ACGAG GATGATTTGA TTGTC (vanB) | 1171 |
| for hybridization | | |
| probe | | |
| Selected sequence | CATCAGGAAR WCGAGCCGGA AAAAG | 1111 |
| for amplification | | |
| prime^{a} | | |

The sequence numbering refers to the Enterococcus faecium vanA gene fragment (SEQ ID NO. 1139).
Nucleotides in capitals are identical to the selected sequences or match those sequences.
Mismatches are indicated by lower-case letters. Dots indicate gaps in the sequences displayed.
“R” and “W” designate nucleotide positions which are degenerated.
“R” stands for A or G; “W” stands for A or T

^{a}This sequence is the reverse-complement of the above selected primer.

Annex XXXIX: Internal hybridization probe for
specific detection of mecA.

| | | Originating | |
|---|---|---|---|
| | | DNA fragment | |
| SEQ ID | | SEQ ID | Nucleotide |
| NO. | Nucleotide sequence | NO. | position |

Resistance gene: mecA

| | | | |
|---|---|---|---|
| 1177 | 5′-GCT CAA CAA GTT CCA | 1178^{a} | 1313-1332 |
| | GAT TA | | |

^{a}Sequence from databases.

Annex XL: Specific and ubiquitous primers for nucleic acid
amplification (hexA sequences).

Originating
DNA fragment

| | | | |
|---|---|---|---|
| | | SEQ ID | Nucleotide |
| SEQ ID NO. | Nucleotide sequence | NO. | position |

Bacterial species: Streptococcus pneumoniae

| | | | |
|---|---|---|---|
| 1179 | 5′-ATT TGG TGA CGG GTG ACT TT | 1183^{a} | 431-450 |
| 1181^{b} | 5′-AGC AGC TTA CTA GAT GCC GT | 1183-1191^{c} | 652-671^{d} |

Sequencing primers

| | | | |
|---|---|---|---|
| 1179 | 5′-ATT TGG TGA CGG GTG ACT TT | 1183^{a} | 431-450 |
| 1182^{b} | 5′-AAC TGC AAG AGA TCC TTT GG | 1183^{a} | 1045-1064 |

^{a}Sequences from databases.
^{b}These sequences are from the complementary DNA strand of the sequence of the originating fragment given in the Sequence Listing.
^{c}These sequences were aligned to derive the corresponding primer.
^{d}The nucleotide positions refer to the hexA sequence fragment (SEQ ID NO. 1183).

Annex XLI: Internal hybridization probe for
specific detection of hexA sequences.

| | | Originating | |
|---|---|---|---|
| | | DNA fragment | |
| SEQ | | SEQ ID | Nucleotide |
| ID NO. | Nucleotide sequence | NO. | position |

Bacterial species: Streptococcus pneumoniae

| | | | |
|---|---|---|---|
| 1180^{a} | 5′-TCC ACC GTT GCC | 1183-1191^{b} | 629-647^{c} |
| | AAT CGC A | | |

^{a}This sequences is from the complementary DNA strand of the sequence of the originating fragment given in the Sequence Listing.
^{b}These sequences were aligned to derive the corresponding primer.
^{c}The nucleotide positions refer to the hexA sequence fragment (SEQ ID NO. 1183).

Annex XLII: Strategy for the selection of Streptococcus pneumoniae species-specific
amplification primers and hybridization probe from hexA sequences.

| | 428 453 626 |
|---|---|
| S. pneumoniae | TGG ATTTGGTGAC GGGTGACTTT TAT...ATTTG CGATTGGCAA CGGTGGAGCA |
| S. pneumoniae | ~~~ ~~~~~~TGAC GGGTGACTTT TAT...ATTTG CGATTGGCAA CGGTGGAGCA |
| S. pneumoniae | ~~~ ~~~~~~TGAC GGGTGACTTT TAT...ATTTG CGATTGGCAA CGGTGGAGCA |
| S. pneumoniae | ~~~ ~~~~~~TGAC GGGTGACTTT TAT...ATTTG CGATTGGCAA CGGTGGAGCA |
| S. pneumoniae | ~~~ ~~~~~~TGAC GGGTGACTTT TAT...ATTTG CGATTGGCAA CGGTGGAGCA |
| S. oralis | ~~~ ~~~~~~~~~~GGGTGACTTT TAT...ATCca CGAcTGGCAg CtGTGGAGCA |
| S. mitis | ~~~ ~~~~GGTGAC GGGTGACTTT TAT...ATTca CGATTGGCAg CtGTGGAGCA |
| S. mitis | ~~~ ~~~~~~TGAC GGGTGACTTT CAG...GCGaG gagcTGtCtc CtaTGGAGCG |
| S. mitis | ~~~ ~~~~~~TGAC GGGTGACTTT CAG...GCGaG gaAcTGtCtc CtaTGGAGCG |
| Selected sequence for | ATTTGGTGAC GGGTGACTTT |
| amplification primer | |
| Selected sequences for | |
| amplification primers^{a} | |
| Selected sequence for | TG CGATTGGCAA CGGTGGA |
| hybridization probe^{a} | |

| | | SEQ |
|---|---|---|
| | | ID |
| | 674 1042 1067 | NO.: |
| S. pneumoniae | AACGGCATCT AGTAAGCTGC TCCA...AATCCAAAG GATCTCTTGC AGTTGGC | 1183 |
| S. pneumoniae | AACGGCATCT AGTAAGCTGC TCCA...AATCCAAAG GATCTCTTG~ ~~~~~~~ | 1184 |
| S. pneumoniae | AACGGCATCT AGTAAGCTGC TCCA...AATCCAAAG GATCTCT~~~ ~~~~~~~ | 1185 |
| S. pneumoniae | AACGGCATCT AGTAAGCTGC TCCA...AATCCAAAG GATCTCTT~~ ~~~~~~~ | 1186 |
| S. pneumoniae | AACGGCATCT AGTAAGCTGC TCCG...AATCCAAAG GATCTCTT~~ ~~~~~~~ | 1187 |
| S. oralis | AgCGGCAgCT AGTAAGCTcC TCCA...~~~~~~~~~ ~~~~~~~~~~ ~~~~~~~ | 1188 |
| S. mitis | AgCGGCATCT AGTAAaCTGC TTCA...AATCCAAAG GATCTCTT~~ ~~~~~~~ | 1189 |
| S. mitis | TcaGGCAgCa gGgAAaCTGC TGGA...~~~~~~~~~ ~~~~~~~~~~ ~~~~~~~ | 1190 |
| S. mitis | TcaGGCAgCg gGgAAatTGC TAGA...AATCCAAAG GATCTCTT~~ ~~~~~~~ | 1191 |
| Selected sequence for | | 1179 |
| amplification primer | | |
| Selected sequences | ACGGCATCT AGTAAGCTGC T | 1181 |
| for amplification | CCAAAG GATCTCTTGC AGTT | 1182 |
| primers^{a} | | |
| Selected sequence for | | 1180 |
| hybridization probe^{a} | | |

The sequence numbering refers to the Streptococcus pneumoniae hexA gene fragment (SEQ ID NO. 1183). Nucleotides in capitals are identical to the selected sequences or match those sequences. Mismatches are indicated by lower-case letters. Dots indicate gaps in the sequences displayed. “—” indicate incomplete sequence data.
^{a}This sequence is the reverse-complement of the selected primer.

Annex XLIII: Specific and ubiquitous primers
for nucleic acid amplification (pcp sequence).

| | | Originating | |
|---|---|---|---|
| | | DNA fragment | |
| SEQ | | SEQ ID | Nucleotide |
| ID NO. | Nucleotide sequence | NO. | position |

Bacterial species: Streptococcus pyogenes

| | | | |
|---|---|---|---|
| 1211 | 5′-ATT CTT GTA ACA GGC TTT | 1215^{a} | 291-314 |
| | GAT CCC | | |
| 1210^{b} | 5′-ACC AGC TTG CCC AAT ACA | 1215^{a} | 473-494 |
| | AAG G | | |

^{a}Sequences from databases.
^{b}These sequences are from the complementary DNA strand of the sequence of the originating fragment given in the Sequence Listing.

Annex XLIV: Specific and ubiquitous primers
for nucleic acid amplification of S. saprophyticus
sequences of unknown coding potential.

| | | Originating | |
|---|---|---|---|
| | | DNA fragment | |
| SEQ ID | | SEQ ID | Nucleotide |
| NO. | Nucleotide sequence | NO. | position |

Bacterial species: Staphylococcus saprophyticus

| | | | |
|---|---|---|---|
| 1208 | 5′-TCA AAA AGT TTT CTA | 74, 1093, | 169-193^{c} |
| | AAA AAT TTA C | 1198^{b} | |
| 1209^{a} | 5′-ACG GGC GTC CAC AAA | 74, 1093, | 355-379^{c} |
| | ATC AAT AGG A | 1198^{b} | |

^{a}This sequence is from the complementary DNA strand of the sequence of the originating fragment given in the Sequence Listing.
^{b}These sequences were aligned to derive the corresponding primer.
^{c}The nucleotide positions refer to the S. saprophyticus unknown gene sequence fragment (SEQ ID NO. 1198).

Annex XLV: Molecular beacon internal hybridization probes for
specific detection of antimicrobial agents resistance
gene sequences.

Originating
DNA fragment

| | | | |
|---|---|---|---|
| | | SEQ ID | Nucleotide |
| SEQ ID NO. | Nucleotide sequence^{a} | NO. | position |

Resistance gene: gyrA

| | | | |
|---|---|---|---|
| 2250 | 5′-CCG TCG GAT GGT GTC GTA TAC CGC GGA GTC | 1954^{b} | 218-243 |
| | GCC GAC GG | | |
| 2251 | 5′-CGG AGC CGT TCT CGC TGC GTT ACA TGC TGG | 1954^{b} | 259-286 |
| | TGG CTC CG | | |

Resistance gene: mecA

| | | | |
|---|---|---|---|
| 1231 | 5′-GCG AGC CCG AAG ATA AAA AAG AAC CTC TGC | 1178^{b} | 1291-1315 |
| | TGC TCG C | | |

Resistance gene: parC

| | | | |
|---|---|---|---|
| 1938^{b} | 5′-CCG CGC ACC ATT GCT TCG TAC ACT GAG GAG | 1321^{c} | 232-260 |
| | TCT CCG CGC GG | | |
| 1939 | 5′-CGA CCC GGA TGG TAG TAT CGA TAA TGA TCC | 1321^{c} | 317-346 |
| | GCC AGC GGC CGG GTC G | | |
| 1955^{b} | 5′-CGC GCA ACC ATT GCT TCG TAC ACT GAG GAG | 1321^{c} | 235-260 |
| | TCT GCG CG | | |

Resistance gene: vanA

| | | | |
|---|---|---|---|
| 1239 | 5′-GCG AGC GCA GAC CTT TCA GCA GAG GAG GCT | 1051 | 860-880 |
| | CGC | | |
| 1240 | 5′-GCG AGC CGG CAA GAC AAT ATG ACA GCA AAA | 1051 | 663-688 |
| | TCG CTC GC | | |

Resistance gene: vanB

| | | | |
|---|---|---|---|
| 1241 | 5′-GCG AGC GGG GAA CGA GGA TGA TTT GAT TGG | 1117 | 555-577 |
| | CTC GC | | |

Resistance gene: vanD

| | | | |
|---|---|---|---|
| 1593 | 5′-CCG AGC GATTTA CCG GAT ACT TGG CTG ICG | 1594 | 835-845 |
| | CTC GG | | |

^{a}Underlined nucleotides indicate the molecular beacon's stem.
^{b}This sequence is from the complementary DNA strand of the sequence of the originating fragment given in the Sequence Listing.
^{c}Sequence from databases.

Annex XLVI: Molecular beacon internal
hybridization probe for specific detection
of S. aureus gene sequences of
unknown coding potential.

| | | Originating | |
|---|---|---|---|
| | | DNA fragment | |
| | | SEQ | |
| SEQ ID | | ID | Nucleotide |
| NO. | Nucleotide sequence^{a} | NO. | position |

Bacterial species: S. aureus

| | | | |
|---|---|---|---|
| 1232 | 5′-GGA GCC GCG CGA TTT TAT | 1244 | 53-80 |
| | AAA TGA ATG TTG ATA ACC GGC | | |
| | TCC | | |

^{a}Underlined nucleotides indicate the molecular beacon's stem.

Annex XLVII: Molecular beacon internal hybridization probes for
specific detection of tuf sequences.

Originating
DNA fragment

| | | | |
|---|---|---|---|
| | | SEQ ID | Nucleotide |
| SEQ ID NO. | Nucleotide sequence^{a} | NO. | position |

Bacterial species: Chlamydia pneumoniae

| | | | |
|---|---|---|---|
| 2091 | 5′-CGC GAC TTG AGA TGG AAC TTA GTG AGC | 20 | 157-183 |
| | TTC TTG GTC GCG | | |
| 2092 | 5′-CGC GAC GAA AGA ACT TCC TGA AGG TCG | 20 | 491-516 |
| | TGC AGG TCC AG | | |

Bacterial species: Chlamydia trachomatis

| | | | |
|---|---|---|---|
| 2213 | 5′-CGT GCC ATT GAC ATG ATT TCC GAA GAA | 1739^{b} | 412-441 |
| | GAC GCT GAA GGC ACG | | |

Bacterial species: Enterococcus faecalis

| | | | |
|---|---|---|---|
| 1236 | 5′-GCG AGC CGT GGT GAA GTT CGC GTT GGT | 883 | 370-391 |
| | GGC TCG C | | |

Bacterial species: Enterococcus faecium

| | | | |
|---|---|---|---|
| 1235 | 5′-GCG AGC CGA AGT TGA AGT TGT TGG TAT | 64 | 412-437 |
| | TGC TGG CTC GC | | |

Bacterial species: Legionella pneumophila

| | | | |
|---|---|---|---|
| 2084^{c} | 5′-CAC GCG TCA ACA CCC GTA CAA GTC GTC | 112 | 461-486 |
| | TTT TGC GCG TG | | |

Bacterial species: Mycoplasma pneumoniae

| | | | |
|---|---|---|---|
| 2096^{c} | 5′-CGC GAC CGG TAC CAC GGC CAG TAA TCG | 2097^{b} | 658-679 |
| | TGT CGC G | | |

Bacterial species: Neisseria gonorrhoeae

| | | | |
|---|---|---|---|
| 2177 | 5′-GGC ACG GAC AAA CCA TTC CTG CTG CCT | 126 | 323-357 |
| | ATC GAA ACG TGT TCC CGT GCC | | |
| 2178 | 5′-GGC ACG ACA AAC CAT TCC TGC TGC CTA | 126 | 323-348 |
| | TCG AAC GTG CC | | |
| 2179 | 5′-GGC AGC TCT ACT TCC GTA CCA CTG ACG | 126 | 692-718 |
| | TAA CCG GCT GCC | | |

^{a}Underlined nucleotides indicate the molecular beacon's stem.
^{b}Sequence from databases.
^{c}This sequence is from the complementary DNA
strand of the sequence of the originating
fragment given in the Sequence Listing.

Originating
DNA fragment

| | | | |
|---|---|---|---|
| | | SEQ ID | Nucleotide |
| SEQ ID NO. | Nucleotide sequence^{a} | NO. | position |

Bacterial species: Pseudomonas aeruginosa

| | | | |
|---|---|---|---|
| 2122 | 5′-CCG AGC GAA TGT AGG AGT CCA GGG TCT | 153, | 280-302^{d} |
| | CTG CTC GG | 880, | |
| | | 2138^{b,c} | |

Bacterial species: Staphylococcus aureus

| | | | |
|---|---|---|---|
| 2186 | 5′-ACG CGC TCA AAG CAG AAG TAT ACG TAT | 1728 | 615-646 |
| | TAT CAA AAG ACG CGC GT | | |

Bacterial group: Staphylococcus sp. other than S. aureus

| | | | |
|---|---|---|---|
| 1233 | 5′-GCG AGC GTT ACT GGT GTA GAA ATG TTC | 878 | 372-394 |
| | CGG CTC GC | | |

Fungal species: Candida albicans

| | | | |
|---|---|---|---|
| 2073 | 5′-CCG AGC AAC ATG ATT GAA CCA TCC ACC | 408 | 404-429 |
| | AAC TGG CTC GG | | |

Fungal species: Candida dubliniensis

| | | | |
|---|---|---|---|
| 2074 | 5′-CCG AGC AAC ATG ATT GAA GCT TCC ACC | 414 | 416-441 |
| | AAC TGG CTC GG | | |

Fungal species: Candida glabrata

| | | | |
|---|---|---|---|
| 2110^{b} | 5′-GCG GGC CCT TAA CGA TTT CAG CGA ATC | 417 | 307-335 |
| | TGG ATT CAG CCC GC | | |
| 2111 | 5′-GCG GGC ATG TTG AAG CCA CCA CCA ACG | 417 | 419-447 |
| | CTT CCT GGC CCG C | | |

Fungal species: Candida krusei

| | | | |
|---|---|---|---|
| 2112^{b} | 5′-GCG GGC TTG ATG AAG TTT GGG TTT CCT | 422 | 318-347 |
| | TGA CAA TTG CCC GC | | |
| 2113 | 5′-GCG GGC ACA AGG GTT GGA CTA AGG AAA | 422 | 419-447 |
| | CCA AGG CAG CCC GC | | |
| 2114 | 5′-GCG GGC ATC GAT GCT ATT GAA CCA CCT | 422 | 505-533 |
| | GTC AGA CCG CCC GC | | |

^{a}Underlined nucleotides indicate the molecular beacon's stem.
^{b}Sequence from databases.
^{c}These sequences were aligned to derive the corresponding primer.
^{d}The nucleotide positions refer to the P. aeruginosa tuf
sequence fragment (SEQ ID NO. 153).

Originating
DNA fragment

| | | | |
|---|---|---|---|
| | | SEQ ID | Nucleotide |
| SEQ ID NO. | Nucleotide sequence^{a} | NO. | position |

Fungal species: Candida lusitaniae

| | | | |
|---|---|---|---|
| 2115^{b} | 5′-GCG GGC GGT AAG TCC ACC GGT AAG ACC | 424 | 304-330 |
| | TTG TTG GCC CGC | | |
| 2116 | 5′-GCG GGC GTA AGT CAC CGG TAA GAC CTT | 424 | 476-502 |
| | GTT GGC CCG C | | |
| 2117 | 5′-GCG GGC GAC GCC ATT GAG CCA CCT TCG | 424 | 512-535 |
| | AGA GCC CGC | | |

Fungal species: Candida parapsilosis

| | | | |
|---|---|---|---|
| 2118^{b} | 5′-GCG GGC TCC TTG ACA ATT TCT TCG TAT | 426 | 301-330 |
| | CTG TTC TTG GCC CGC | | |

Fungal species: Candida tropicalis

| | | | |
|---|---|---|---|
| 2119 | 5′-GCG GGC TTA CAA CCC TAA GGC TGT TCC | 429 | 357-384 |
| | ATT CGT TGC CCG C | | |
| 2120 | 5′-GCG GGC AGA AAC CAA GGC TGG TAA GGT | 429 | 459-487 |
| | TAC CGG AGC CCG C | | |

Fungal species: Cryptococcus neoformans

| | | | |
|---|---|---|---|
| 2106 | 5′-GCG AGC AGA GCA CGC CCT CCT CGC CGC | 623, | 226-244^{d} |
| | TCG C | 1985, | |
| | | 1986^{c} | |
| 2107 | 5′-GCG AGC TCC CCA TCT CTG GTT GGC ACG | 623, | 390-408^{d} |
| | CTC GC | 1985, | |
| | | 1986^{c} | |

Bacterial genus: Legionella sp.

| | | | |
|---|---|---|---|
| 2083 | 5′-CCG CCG ATG TTC CGT AAA TTA CTT GAI | 111-112^{d} | 488-519^{e} |
| | GAA GGT CGA GCC GGC GG | | |

^{a}Underlined nucleotides indicate the molecular beacon's stem.
^{b}This sequence is from the complementary DNA strand of the
sequence of the originating fragment given in the Sequence Listing.
^{c}These sequences were aligned to derive the corresponding primer.
^{d}The nucleotide positions refer to the C. neoformans tuf (EF-1)
sequence fragment (SEQ ID NO. 623).
^{e}The nucleotide positions refer to the L. pneumophila tuf (EF-1)
sequence fragment (SEQ ID NO. 112).

Originating
DNA fragment

| | | | |
|---|---|---|---|
| | | SEQ ID | Nucleotide |
| SEQ ID NO. | Nucleotide sequence^{a} | NO. | position |

Fungal genus: Candida sp.

| | | | |
|---|---|---|---|
| 2108 | 5′-GCG GGC AAC TTC RTC AAG AAG GTT GGT | 414, | 52-80^{c} |
| | TAC AAC CCG CCC GC | 417, | |
| | | 422, | |
| | | 424, | |
| | | 426, | |
| | | 429, | |
| | | 624^{b} | |
| 2109 | 5′-GCGP GGC CCA ATC TCT GGT TGG AAY GGT | Same as | 100-125^{c} |
| | GAC AAG CCC GC | SEQ ID | |
| | | NO. 2108 | |

Bacterial group: Pseudomonads

| | | | |
|---|---|---|---|
| 2121 | 5′-CGA CCG CIA GCC GCA CAC CAA GTT CCG | 153- | 598-616^{e} |
| | GTC G | 155, | |
| | | 205, | |
| | | 880, | |
| | | 2137^{d,} | |
| | | 2138^{d,b} | |

^{a}Underlined nucleotides indicate the molecular beacon's stem.
^{b}These sequences were aligned to derive the corresponding primer.
^{c}The nucleotide positions refer to the C. albicans tuf (EF-1)
sequence fragment (SEQ ID NO. 624).
^{d}Sequence from databases.
^{e}The nucleotide positions refer to the P. aeruginosa tuf sequence fragment (SEQ ID NO. 153).

Annex XLVIII: Molecular beacon internal hybridization probes
for specific detection of ddl and mtl gene sequences.

Originating
DNA fragment

| | | | |
|---|---|---|---|
| | | SEQ ID | Nucleotide |
| SEQ ID NO. | Nucleotide sequence^{a} | NO. | position |

Bacterial species: E. faecium (ddl)

| | | | |
|---|---|---|---|
| 1237 | 5′-GCG AGC CGC GAA ATC GAA GTT GCT GTA | 1242^{b} | 334-359 |
| | TTA GGG CTC GC | | |

Bacterial species: E. faecalis (mtl)

| | | | |
|---|---|---|---|
| 1238 | 5′-GCG AGC GGC GTT AAT TTT GGC ACC GAA | 1243^{b} | 631-656 |
| | GAA GAG CTC GC | | |

^{a}Underlined nucleotides indicate the molecular beacon's stem.
^{b}Sequence from databases.

Annex XLIX: Internal hybridization probe for
specific detection of S. aureus
sequences of unknown coding potential.

| | | Originating | |
|---|---|---|---|
| | | DNA fragment | |
| SEQ | | SEQ | |
| ID | | ID | Nucleotide |
| NO. | Nucleotide sequence | NO. | position |

Bacterial species: Staphylococcus aureus

| | | | |
|---|---|---|---|
| 1234 | 5′-ACT AAA TAA ACG CTC ATT CG | 1244 | 35-54 |

Annex L: Specific and ubiquitous primers for nucleic acid
amplification (antimicrobial agents resistance genes
sequences).

Originating
DNA fragment

| | | | |
|---|---|---|---|
| | | SEQ ID | Nucleotide |
| SEQ ID NO. | Nucleotide sequence | NO. | position |

Resistance gene: aac(2′)-Ia

| | | | |
|---|---|---|---|
| 1344 | 5′-AGC AGC AAC GAT GTT ACG CAG CAG | 1348^{a} | 163-186 |
| 1345^{b} | 5′-CCC GCC GAG CAT TTC AAC TAT TG | 1348^{a} | 392-414 |
| 1346 | 5′-GAT GTT ACG CAG CAG GGC AGT C | 1348^{a} | 172-193 |
| 1347^{b} | 5′-ACC AAG CAG GTT CGC AGT CAA GTA | 1348^{a} | 467-490 |

Resistance gene: aac(3′)-Ib

| | | | |
|---|---|---|---|
| 1349 | 5′-CAG CCG ACC AAT GAG TAT CTT GCC | 1351^{a} | 178-201 |
| 1350^{b} | 5′-TAA TCA GGG CAG TTG CGA CTC CTA | 1351^{a} | 356-379 |

Resistance gene: aac(3′)-IIb

| | | | |
|---|---|---|---|
| 1352 | 5′-CCA CGC TGA CAG AGC CGC ACC G | 1356^{a} | 383-404 |
| 1353^{b} | 5′-GGC CAG CTC CCA TCG GAC CCT G | 1356^{a} | 585-606 |
| 1354 | 5′-CAC GCT GAC AGA GCC GCA CCG | 1356^{a} | 384-404 |
| 1355^{b} | 5′-ATG CCG TTG CTG TCG AAA TCC TCG | 1356^{a} | 606-629 |

Resistance gene: aac(3′)-IVa

| | | | |
|---|---|---|---|
| 1357 | 5′-GCC CAT CCA TTT GCC TTT GC | 1361^{a} | 295-314 |
| 1358^{b} | 5′-GCG TAC CAA CTT GCC ATC CTG AAG | 1361^{a} | 517-540 |
| 1359 | 5′-TGC CCC TGC CAC CTC ACT C | 1361^{a} | 356-374 |
| 1360^{b} | 5′-CGT ACC AAC TTG CCA TCC TGA AGA | 1361^{a} | 516-539 |

Resistance gene: aac(3′)-VIa

| | | | |
|---|---|---|---|
| 1362 | 5′-CGC CGC CAT CGC CCA AAG CTG G | 1366^{a} | 285-306 |
| 1363^{b} | 5′-CGG CAT AAT GGA GCG CGG TGA CTG | 1366^{a} | 551-574 |
| 1364 | 5′-TTT CTC GCC CAC GCA GGA AAA ATC | 1366^{a} | 502-525 |
| 1365^{b} | 5′-CAT CCT CGA CGA ATA TGC CGC G | 1366^{a} | 681-702 |

Resistance gene: aac(6′)-Ia

| | | | |
|---|---|---|---|
| 1367 | 5′-CAA ATA TAC TAA CAG AAG CGT TCA | 1371^{a} | 56-79 |
| 1368^{b} | 5′-AGG ATC TTG CCA ATA CCT TTA T | 1371^{a} | 269-290 |
| 1379 | 5′-AAA CCT TTG TTT CGG TCT GCT AAT | 1371^{a} | 153-176 |
| 1380^{b} | 5′-AAG CGA TTC CAA TAA TAC CTT GCT | 1371^{a} | 320-343 |

Resistance gene: aac(6′)-Ic

| | | | |
|---|---|---|---|
| 1372 | 5′-GCT TTC GTT GCC TTT GCC GAG GTC | 1376^{a} | 157-180 |
| 1373^{b} | 5′-CAC CCC TGT TGC TTC GCC CAC TC | 1376^{a} | 304-326 |
| 1374 | 5′-AGA TAT TGG CTT CGC CGC ACC ACA | 1376^{a} | 104-127 |
| 1375^{b} | 5′-CCC TGT TGC TTC GCC CAC TCC TG | 1376^{a} | 301-323 |

Resistance gene: ant(3′)-Ia

| | | | |
|---|---|---|---|
| 1377 | 5′-GCC GTG GGT CGA TGT TTG ATG TTA | 1381^{a} | 100-123 |
| 1378^{b} | 5′-GCT CGA TGA CGC CAA CTA CCT CTG | 1381^{a} | 221-244 |
| 1379 | 5′-AGC AGC AAC GAT GTT ACG CAG CAG | 1381^{a} | 127-150 |
| 1380^{b} | 5′-CGC TCG ATG ACG CCA ACT ACC TCT | 1381^{a} | 222-245 |

Resistance gene: ant(4′)-Ia

| | | | |
|---|---|---|---|
| 1382 | 5′-TAG ATA TGA TAG GCG GTA AAA AGC | 1386^{a} | 149-172 |
| 1383^{b} | 5′-CCC AAA TTC GAG TAA GAG GTA TT | 1386^{a} | 386-408 |
| 1384 | 5′-GAT ATG ATA GGC GGT AAA AAG C | 1386^{a} | 151-172 |
| 1385^{b} | 5′-TCC CAA ATT CGA GTA AGA GGT A | 1386^{a} | 388-409 |

Resistance gene: aph(3′)-Ia

| | | | |
|---|---|---|---|
| 1387 | 5′-TTA TGC CTC TTC CGA CCA TCA AGC | 1391^{a} | 233-256 |
| 1338^{b} | 5′-TAC GCT CGT CAT CAA AAT CAC TCG | 1391^{a} | 488-511 |
| 1389 | 5′-GAA TAA CGG TTT GGT TGA TGC GAG | 1391^{a} | 468-491 |
| 1390^{b} | 5′-ATG GCA AGA TCC TGG TAT CGG TCT | 1391^{a} | 669-692 |

Resistance gene: aph(3′)-IIa

| | | | |
|---|---|---|---|
| 1392 | 5′-TGG GTG GAG AGG CTA TTC GGC TAT | 1396^{a} | 43-66 |
| 1393^{b} | 5′-CAG TCC CTT CCC GCT TCA GTG AC | 1396^{a} | 250-272 |
| 1394 | 5′-GAC GTT GTC ACT GAA GCG GGA AGG | 1396^{a} | 244-267 |
| 1395^{b} | 5′-CTT GGT GGT CGA ATG GGC AGG TAG | 1396^{a} | 386-409 |

Resistance gene: aph(3′)-IIIa

| | | | |
|---|---|---|---|
| 1397 | 5′-GTG GGA GAA AAT GAA AAC CTA T | 1401^{a} | 103-124 |
| 1398^{b} | 5′-ATG GAG TGA AAG AGC CTG AT | 1401^{a} | 355-374 |
| 1399 | 5′-ACC TAT GAT GTG GAA CGG GAA AAG | 1401^{a} | 160-183 |
| 1400^{b} | 5′-CGA TGG AGT GAA AGA GCC TGA TG | 1401^{a} | 354-376 |

Resistance gene: aph(3′)-VIa

| | | | |
|---|---|---|---|
| 1402 | 5′-TAT TCA ACA ATT TAT CGG AAA CAG | 1406^{a} | 18-41 |
| 1403^{b} | 5′-TCA GAG AGC CAA CTC AAC ATT TT | 1406^{a} | 175-197 |
| 1404 | 5′-AAA CAG CGT TTT AGA GCC AAA TAA | 1406^{a} | 36-59 |
| 1405^{b} | 5′-TTC TCA GAG AGC CAA CTC AAC ATT | 1406^{a} | 177-200 |

Resistance gene: blaCARB

| | | | |
|---|---|---|---|
| 1407 | 5′-CCC TGT AAT AGA AAA GCA AGT AGG | 1411^{a} | 351-374 |
| 1408^{b} | 5′-TTG TCG TAT CCC TCA AAT CAC C | 1411^{a} | 556-577 |
| 1409 | 5′-TGG GAT TAC AAT GGC AAT CAG CG | 1411^{a} | 205-227 |
| 1410^{b} | 5′-GGG GAA TAG GTC ACA AGA TCT GCT T | 1411^{a} | 329-353 |

Resistance gene: blaCMY-2

| | | | |
|---|---|---|---|
| 1412 | 5′-GAG AAA ACG CTC CAG CAG GGC | 1416^{a} | 793-813 |
| 1413^{b} | 5′-CAT GAG GCT TTC ACT GCG GGG | 1416^{a} | 975-995 |
| 1414 | 5′-TAT CGT TAA TCG CAC CAT CAC | 1416^{a} | 90-110 |
| 1415^{b} | 5′-ATG CAG TAA TGC GGC TTT ATC | 1416^{a} | 439-459 |

Resistance genes: blaCTX-M-1, blaCTX-M-2

| | | | |
|---|---|---|---|
| 1417 | 5′-TGG TTA ACT AYA ATC CSA TTG CGG A | 1423^{a} | 314-338 |
| 1418^{b} | 5′-ATG CTT TAC CCA GCG TCA GAT T | 1423^{a} | 583-604 |

Resistance gene: blaCTX-M-1

| | | | |
|---|---|---|---|
| 1419 | 5′-CGA TGA ATA AGC TGA TTT CTC ACG | 1423^{a} | 410-433 |
| 1420^{b} | 5′-TGC TTT ACC CAG CGT CAG ATT ACG | 1423^{a} | 580-603 |
| 1421 | 5′-AAT TAG AGC GGC AGT CGG GAG GAA | 1423^{a} | 116-139 |
| 1422^{b} | 5′-GAA ATC AGC TTA TTC ATC GCC ACG | 1423^{a} | 405-428 |

Resistance gene: b1aCTX-M-2

| | | | |
|---|---|---|---|
| 1424 | 5′-GTT AAC GGT GAT GGC GAC GCT AC | 1428^{a} | 30-52 |
| 1425^{b} | 5′-GAA TTA TCG GCG GTG TTA ATC AGC | 1428^{a} | 153-176 |
| 1426 | 5′-CAC GCT CAA TAC CGC CAT TCC A | 1428^{a} | 510-531 |
| 1427^{b} | 5′-TTA TCG CCC ACT ACC CAT GAT TTC | 1428^{a} | 687-710 |

Resistance gene: b1aIMP

| | | | |
|---|---|---|---|
| 1429 | 5′-TTT ACG GCT AAA GAT ACT GAA AAG T | 1433^{a} | 205-229 |
| 1430^{b} | 5′-GTT TAA TAA AAC AAC CAC CGA ATA AT | 1433^{a} | 513-538 |
| 1431 | 5′-TAA TTG ACA CTC CAT TTA CGG CTA A | 1433^{a} | 191-215 |
| 1432^{b} | 5′-ACC GAA TAA TAT TTT CCT TTC AGG CA | 1433^{a} | 497-522 |

Resistance gene: b1aOXA2

| | | | |
|---|---|---|---|
| 1434 | 5′-CAC AAT CAA GAC CAA GAT TTG CGA T | 1438^{a} | 319-343 |
| 1435^{b} | 5′-GAA AGG GCA GCT CGT TAC GAT AGA G | 1438^{a} | 532-556 |

Resistance gene: b1aOXA10

| | | | |
|---|---|---|---|
| 1436 | 5′-CAG CAT CAA CAT TTA AGA TCC CCA | 1439^{a} | 194-217 |
| 1437^{b} | 5′-CTC CAC TTG ATT AAC TGC GGA AAT TC | 1439^{a} | 479-504 |

Resistance gene: b1aPER-1

| | | | |
|---|---|---|---|
| 1440 | 5′-AGA CCG TTA TCG TAA ACA GGG CTA AG | 1442^{a} | 281-306 |
| 1441^{b} | 5′-TTT TTT GCT CAA ACT TTT TCA GGA TC | 1442^{a} | 579-604 |

Resistance gene: b1aPER-2

| | | | |
|---|---|---|---|
| 1443 | 5′-CTT CTG CTC TGC TGA TGC TTG GC | 1445^{a} | 32-54 |
| 1444^{b} | 5′-GGC GAC CAG GTA TTT TGT AAT ACT GC | 1445^{a} | 304-329 |

Resistance genes: b1aPER-1, b1aPER-2

| | | | |
|---|---|---|---|
| 1446 | 5′-GGC CTG YGA TTT GTT ATT TGA ACT GGT | 1442^{a} | 414-440 |
| 1447^{b} | 5′-CGC TST GGT CCT GTG GTG GTT TC | 1442^{a} | 652-674 |
| 1448 | 5′-GAT CAG GTG CAR TAT CAA AAC TGG AC | 1442^{a} | 532-557 |
| 1449^{b} | 5′-AGC WGG TAA CAA YCC TTT TAA CCG CT | 1442^{a} | 671-696 |

Resistance gene: b1aSHV

| | | | |
|---|---|---|---|
| 1883 | 5′-AGC CGC TTG AGC AAA TTA AAC TA | 1900^{a} | 71-93 |
| 1884^{b} | 5′-GTA TCC CGC AGA TAA ATC ACC AC | 1900^{a} | 763-785 |
| 1885 | 5′-AGC GAA AAA CAC CTT GCC GAC | 1900^{a} | 313-333 |
| 1884^{b} | 5′-GTA TCC CGC AGA TAA ATC ACC AC | 1900^{a} | 763-785 |

Resistance gene: b1aTEM

| | | | |
|---|---|---|---|
| 1906 | 5′-CCT TAT TCC CTT TTT TGC GG | 1927^{a} | 27-46 |
| 1907^{b} | 5′-CAC CTA TCT CAG CGA TCT GTC T | 1927^{a} | 817-838 |
| 1908 | 5′-AAC AGC GGT AAG ATC CTT GAG AG | 1927^{a} | 148-170 |
| 1907^{b} | 5′-CAC CTA TCT CAG CGA TCT GTC T | 1927^{a} | 817-838 |

Resistance gene: catI

| | | | |
|---|---|---|---|
| 2145 | 5′-GCA AGA TGT GGC GTG TTA CGG T | 2147^{a} | 363-384 |
| 2146^{b} | 5′-GGG GCG AAG AAG TTG TCC ATA TT | 2147^{a} | 484-506 |

Resistance gene: catII

| | | | |
|---|---|---|---|
| 2148 | 5′-CAG ATT AAA TGC GGA TTC AGC C | 2150^{a} | 67-88 |
| 2149^{b} | 5′-ATC AGG TAA ATC ATC AGC GGA TA | 2150^{a} | 151-173 |

Resistance gene: catIII

| | | | |
|---|---|---|---|
| 2151 | 5′-ATA TTT CAG CAT TAC CTT GGG TT | 2153^{a} | 419-441 |
| 2152^{b} | 5′-TAC ACA ACT CTT GTA GCC GAT TA | 2153^{a} | 603-625 |

Resistance gene: catP

| | | | |
|---|---|---|---|
| 2154 | 5′-CGC CAT TCA GAG TTT AGG AC | 2156^{a} | 178-197 |
| 2155^{b} | 5′-TTC CAT ACC GTT GCG TAT CAC TT | 2156^{a} | 339-361 |

Resistance gene: cat

| | | | |
|---|---|---|---|
| 2157 | 5′-CCA CAG AAA TTG ATA TTA GTG TTT TAT | 2159^{a} | 89-115 |
| 2158^{b} | 5′-TCG CTA TTG TAA CCA GTT CTA | 2159^{a} | 201-221 |
| 2160 | 5′-TTT TGA ACA CTA TTT TAA CCA GC | 2162^{a} | 48-70 |
| 2161^{b} | 5′-GAT TTA ACT TAT CCC AAT AAC CT | 2162^{a} | 231-253 |

Resistance gene: dfrA

| | | | |
|---|---|---|---|
| 1450 | 5′-ACC ACT GGG AAT ACA CTT GTA ATG GC | 1452^{a} | 106-131 |
| 1451^{b} | 5′-ATC TAC CTG GTC AAT CAT TGC TTC GT | 1452^{a} | 296-321 |

Resistance gene: dhfrIa

| | | | |
|---|---|---|---|
| 1457 | 5′-CAA AGG TGA ACA GCT CCT GTT T | 1461^{a} | 75-96 |
| 1458^{b} | 5′-TCC GTT ATT TTC TTT AGG TTG GTT AAA | 1461^{a} | 249-275 |
| 1459 | 5′-AAG GTG AAC AGC TCC TGT TT | 1461^{a} | 77-96 |
| 1560^{b} | 5′-GAT CAC TAC GTT CTC ATT GTC A | 1461^{a} | 207-228 |

Resistance genes: dhfrIa, dhfrXV

| | | | |
|---|---|---|---|
| 1453 | 5′-ATC GAA GAA TGG AGT TAT CGG RAA TG | 1461^{a} | 27-52 |
| 1454^{b} | 5′-CCT AAA AYT RCT GGG GAT TTC WGG A | 1461^{a} | 384-408 |
| 1455 | 5′-CAG GTG GTG GGG AGA TAT ACA AAA | 1461^{a} | 290-313 |
| 1456^{b} | 5′-TAT GTT AGA SRC GAA GTC TTG GKT AA | 1461^{a} | 416-441 |

Resistance gene: dhfrIb

| | | | |
|---|---|---|---|
| 1466 | 5′-AAG CAT TGA CCT ACA ATC AGT GT | 1470^{a} | 98-120 |
| 1467^{b} | 5′-AAT ACA ACT ACA TTG TCA TCA TTT GAT | 1470^{a} | 204-230 |
| 1468 | 5′-CGT TAC CCG CTC AGG TTG GAC ATC AA | 1470^{a} | 183-208 |
| 1469^{b} | 5′-CAT CCC CCT CTG GCT CGA TGT CG | 1470^{a} | 354-376 |

Resistance gene: dhfrV

| | | | |
|---|---|---|---|
| 1471 | 5′-GAT AAT GAC AAC GTA ATA GTA TTC CC | 1475^{a} | 208-233 |
| 1472^{b} | 5′-GCT CAA TAT CAA TCG TCG ATA TA | 1475^{a} | 342-364 |
| 1473 | 5′-TTA AAG CCT TGA CGT ACA ACC AGT GG | 1475^{a} | 95-120 |
| 1474^{b} | 5′-TGG GCA ATG TTT CTC TGT AAA TCT CC | 1475^{a} | 300-325 |

Resistance genes: dhfrIb, dhfrV

| | | | |
|---|---|---|---|
| 1462 | 5′-GCA CTC CCY AAT AGG AAA TAC GC | 1470^{a} | 157-179 |
| 1463^{b} | 5′-AGT GTT GCT CAA AAA CAA CTT CG | 1470^{a} | 405-427 |
| 1464 | 5′-ACG TTY GAA TCT ATG GGM GCA CT | 1470^{a} | 139-161 |
| 1465^{b} | 5′-GTC GAT AAG TGG AGC GTA GAG GC | 1470^{a} | 328-350 |

Resistance gene: dhfrVI

| | | | |
|---|---|---|---|
| 1476 | 5′-GGC GAG CAG CTC CTA TTC AAA G | 1480^{a} | 79-100 |
| 1477^{b} | 5′-TAG GTA AGC TAA TGC CGA TTC AAC A | 1480^{a} | 237-261 |
| 1478 | 5′-GAG AAT GGA GTA ATT GGC TCT GGA TT | 1480^{a} | 31-56 |
| 1479^{b} | 5′-GCG AAA TAC ACA ACA TCA GGG TCA T | 1480^{a} | 209-233 |

Resistance gene: dhfrVII

| | | | |
|---|---|---|---|
| 1485 | 5′-AAA ATG GCG TAA TCG GTA ATG GC | 1489^{a} | 32-54 |
| 1486^{b} | 5′-CAT TTG AGC TTG AAA TTC CTT TCC TC | 1489^{a} | 189-214 |
| 1487 | 5′-AAT CGA AAA TAT GCA GTA GTG TCG AG | 1489^{a} | 166-191 |
| 1488^{b} | 5′-AGA CTA TTG TAG ATT TGA CCG CCA | 1489^{a} | 294-317 |

Resistance genes: dhfrVII, dhfrXVII

| | | | |
|---|---|---|---|
| 1481 | 5′-RTT ACA GAT CAT KTA TAT GTC TCT | 1489^{a} | 268-291 |
| 1482^{b} | 5′-TAA TTT ATA TTA GAC AWA AAA AAC TG | 1489^{a} | 421-446 |
| 1483 | 5′-CAR YGT CAG AAA ATG GCG TAA TC | 1489^{a} | 23-45 |
| 1484^{b} | 5′-TKC AAA GCR WTT TCT ATT GAA GGA AA | 1489^{a} | 229-254 |

Resistance gene: dhfrVIII

| | | | |
|---|---|---|---|
| 1490 | 5′-GAC CTA TGA GAG CTT GCC CGT CAA A | 1494^{a} | 144-168 |
| 1491^{b} | 5′-TCG CCT TCG TAC AGT CGC TTA ACA AA | 1494^{a} | 376-401 |
| 1492 | 5′-CAT TTT AGC TGC CAC CGC CAA TGG TT | 1494^{a} | 18-43 |
| 1493^{b} | 5′-GCG TCG CTG ACG TTG TTC ACG AAG A | 1494^{a} | 245-269 |

Resistance gene: dhfrIX

| | | | |
|---|---|---|---|
| 1495 | 5′-TCT CTA AAC ATG ATT GTC GCT GTC | 1499^{a} | 7-30 |
| 1496^{b} | 5′-CAG TGA GGC AAA AGT TTT TCT ACC | 1499^{a} | 133-156 |
| 1497 | 5′-CGG ACG ACT TCA TGT GGT AGT CAG T | 1499^{a} | 171-195 |
| 1498^{b} | 5′-TTT GTT TTC AGT AAT GGT CGG GAC CT | 1499^{a} | 446-471 |

Resistance gene: dhfrXII

| | | | |
|---|---|---|---|
| 1500 | 5′-ATC GGG TTA TTG GCA ATG GTC CTA | 1504^{a} | 50-73 |
| 1501^{b} | 5′-GCG GTA GTT AGC TTG GCG TGA GAT T | 1504^{a} | 201-225 |
| 1502 | 5′-GCG GGC GGA GCT GAG ATA TAC A | 1504^{a} | 304-325 |
| 1503^{b} | 5′-AAC GGA GTG GGT GTA CGG AAT TAC AG | 1504^{a} | 452-477 |

Resistance gene: dhfrXIII

| | | | |
|---|---|---|---|
| 1505 | 5′-ATT TTT CGC AGG CTC ACC GAG AGC | 1507^{a} | 106-129 |
| 1506^{b} | 5′-CGG ATG AGA CAA CCT CGA ATT CTG CTG | 1507^{a} | 413-439 |

Resistance gene: dhfrXV

| | | | |
|---|---|---|---|
| 1508 | 5′-AGA ATG TAT TGG TAT TTC CAT CTA TCG | 1512^{a} | 215-241 |
| 1509^{b} | 5′-CAA TGT CGA TTG TTG AAA TAT GTA AA | 1512^{a} | 336-361 |
| 1510 | 5′-TGG AGT GCC AAA GGG GAA CAA T | 1512^{a} | 67-88 |
| 1511^{b} | 5′-CAG ACA CAA TCA CAT GAT CCG TTA TCG | 1512^{a} | 266-292 |

Resistance gene: dhfrXVII

| | | | |
|---|---|---|---|
| 1513 | 5′-TTC AAG CTC AAA TGA AAA CGT CC | 1517^{a} | 201-223 |
| 1514^{b} | 5′-GAA ATT CTC AGG CAT TAT AGG GAA T | 1517^{a} | 381-405 |
| 1515 | 5′-GTG GTC AGT AAA AGG TGA GCA AC | 1517^{a} | 66-88 |
| 1516^{b} | 5′-TCT TTC AAA GCA TTT TCT ATT GAA GG | 1517^{a} | 232-257 |

Resistance gene: embB

| | | | |
|---|---|---|---|
| 2102 | 5′-CAC CTT CAC CCT GAC CGA CG | 2105^{a} | 822-841 |
| 2103^{b} | 5′-CGA ACC AGC GGA AAT AGT TGG AC | 2105^{a} | 948-970 |

Resistance genes: ereA, ereA2

| | | | |
|---|---|---|---|
| 1528 | 5′-AAC TTG AGC GAT TTT CGG ATA CCC TG | 1530^{a} | 80-105 |
| 1529^{b} | 5′-TTG CCG ATG AAA TAA CCG CCG ACT | 1530^{a} | 317-340 |

Resistance gene: ereB

| | | | |
|---|---|---|---|
| 1531 | 5′-TCT TTT TGT TAC GAC ATA CGC TTT T | 1535^{a} | 152-176 |
| 1532^{b} | 5′-AGT GCT TCT TTA TCC GCT GTT CTA | 1535^{a} | 456-479 |
| 1533 | 5′-CAG CGG ATA AAG AAG CAC TAC ACA TT | 1535^{a} | 461-486 |
| 1534^{b} | 5′-CCT CCT GAA ATA AAG CCC GAC AT | 1535^{a} | 727-749 |

Resistance gene: gyrA

| | | | |
|---|---|---|---|
| 1340 | 5′-GAA CAA GGT ATG ACA CCG GAT AAA T | 1299^{a} | 163-188 |
| 1341^{b} | 5′-GAT AAC TGA AAT CCT GAG CCA TAC G | 1299^{a} | 274-299 |
| 1936 | 5′-TAC CAC CCG CAC GGC | 1954^{a} | 205-219 |
| 1937^{b} | 5′-CGG AGT CGC CGT CGA TG | 1954^{a} | 309-325 |
| 1942 | 5′-GAC TGG AAC AAA GCC TAT AAA AAA TCA | 1954^{a} | 148-174 |
| 1937^{b} | 5′-CGG AGT CGC CGT CGA TG | 1954^{a} | 309-325 |
| 2040 | 5′-TGT GAC CCC AGA CAA ACC C | 2054^{a} | 33-51 |
| 2041^{b} | 5′-GTT GAG CGG CAG CAC TAT CT | 2054^{a} | 207-226 |

Resistance gene: inhA

| | | | |
|---|---|---|---|
| 2098 | 5′-CTG AGT CAC ACC GAC AAA CGT C | 2101^{a} | 910-931 |
| 2099^{b} | 5′-CCA GGA CTG AAC GGG ATA CGA A | 2101^{a} | 1074-1095 |

Resistance genes: linA, linA′

| | | | |
|---|---|---|---|
| 1536 | 5′-AGA TGT ATT AAC TGG AAA ACA ACA A | 1540^{a} | 99-123 |
| 1537^{b} | 5′-CTT TGT AAT TAG TTT CTG AAA ACC A | 1540^{a} | 352-376 |
| 1538 | 5′-TTA GAA GAT ATA GGA TAC AAA ATA GAA G | 1540^{a} | 187-214 |
| 1539^{b} | 5′-GAA TGA AAA AGA AGT TGA GCT T | 1540^{a} | 404-425 |

Resistance gene: linB

| | | | |
|---|---|---|---|
| 1541 | 5′-TGA TAA TCT TAT ACG TGG GGA ATT T | 1545^{a} | 246-270 |
| 1542^{b} | 5′-ATA ATT TTC TAA TTG CCC TGT TTC AT | 1545^{a} | 359-384 |
| 1543 | 5′-GGG CAA TTA GAA AAT TAT TTA TCA GA | 1545^{a} | 367-392 |
| 1544^{b} | 5′-TTT TAC TCA TGT TTA GCC AAT TAT CA | 1545^{a} | 579-604 |

Resistance gene: mefA

| | | | |
|---|---|---|---|
| 1546 | 5′-CAA GAA GGA ATG GCT GTA CTA C | 1548^{a} | 625-646 |
| 1547^{b} | 5′-TAA TTC CCA AAT AAC CCT AAT AAT AGA | 1548^{a} | 816-842 |

Resistance gene: mefE

| | | | |
|---|---|---|---|
| 1549 | 5′-GCT TAT TAT TAG GAA GAT TAG GGG GC | 1551^{a} | 815-840 |
| 1550^{b} | 5′-TAG CAA GTG ACA TGA TAC TTC CGA | 1551^{a} | 1052-1075 |

Resistance genes: mefA, mefE

| | | | |
|---|---|---|---|
| 1552 | 5′-GGC AAG CAG TAT CAT TAA TCA CTA | 1548^{a} | 50-73 |
| 1553^{b} | 5′-CAA TGC TAC GGA TAA ACA ATA CTA TC | 1548^{a} | 318-343 |
| 1554 | 5′-AGA AAA TTA AGC CTG AAT ATT TAG GAC | 1548^{a} | 1010-1035 |
| 1555^{b} | 5′-TAG TAA AAA CCA ATG ATT TAC ACC G | 1548^{a} | 1119-1143 |

Resistance genes: mphA, mphK

| | | | |
|---|---|---|---|
| 1556 | 5′-ACT GTA CGC ACT TGC AGC CCG ACA T | 1560^{a} | 33-57 |
| 1557^{b} | 5′-GAA CGG CAG GCG ATT CTT GAG CAT | 1560^{a} | 214-237 |
| 1558 | 5′-GTG GTG GTG CAT GGC GAT CTC T | 1560^{a} | 583-604 |
| 1559^{b} | 5′-GCC GCA GCG AGG TAC TCT TCG TTA | 1560^{a} | 855-878 |

Resistance gene: mupA

| | | | |
|---|---|---|---|
| 2142 | 5′-GCC TTA ATT TCG GAT AGT GC | 2144^{a} | 1831-1850 |
| 2143^{b} | 5′-GAG AAA GAG CCC AAT TAT CTA ATG T | 2144^{a} | 2002-2026 |

Resistance gene: parC

| | | | |
|---|---|---|---|
| 1342 | 5′-GAT GTT ATT GGT CAA TAT CAT CCA | 1321^{a} | 205-229 |
| 1343^{b} | 5′-AAG AAA CTG TCT CTT TAT TAA TAT CAC GT | 1321^{a} | 396-425 |
| 1934 | 5′-GAA CGC CAG CGC GAA ATT CAA AAA G | 1781 | 67-91 |
| 1935^{b} | 5′-AGC TCG GCA TAC TTC GAC AGG | 1781 | 277-297 |
| 2044 | 5′-ACC GTA AGT CGG CCA AGT CA | 2055^{a} | 176-195 |
| 2045^{b} | 5′-GTT CTT TCT CCG TAT CGT C | 2055^{a} | 436-454 |

Resistance gene: ppflo-like

| | | | |
|---|---|---|---|
| 2163 | 5′-ACC TTC ATC CTA CCG ATG TGG GTT | 2165^{a} | 922-945 |
| 2164^{b} | 5′-CAA CGA CAC CAG CAC TGC CAT TG | 2165^{a} | 1136-1158 |

Resistance gene: rpoB

| | | | |
|---|---|---|---|
| 2065 | 5′-CCA GGA CGT GGA GGC GAT CAC A | 2072^{a} | 1218-1239 |
| 2066^{b} | 5′-CAC CGA CAG CGA GCC GAT CAG A | 2072^{a} | 1485-1506 |

Resistance gene: satG

| | | | |
|---|---|---|---|
| 1581 | 5′-AAT TGG GGA CTA CAC CTA TTA TGA TG | 1585^{a} | 93-118 |
| 1582^{b} | 5′-GGC AAA TCA GTC AGT TCA GGA GT | 1585^{a} | 310-332 |
| 1583 | 5′-CGA TTG GCA ACA ATA CAC TCC TG | 1585^{a} | 294-316 |
| 1584^{b} | 5′-TCA CCT ATT TTT ACG CCT GGT AGG AC | 1585^{a} | 388-413 |

Resistance gene: sulII

| | | | |
|---|---|---|---|
| 1961 | 5′-GCT CAA GGC AGA TGG CAT TCC C | 1965^{a} | 222-243 |
| 1962^{b} | 5′-GGA CAA GGC GGT TGC GTT TGA T | 1965^{a} | 496-517 |
| 1963 | 5′-CAT TCC CGT CTC GCT CGA CAG T | 1965^{a} | 237-258 |
| 1964^{b} | 5′-ATC TGC CTG CCC GTC TTG C | 1965^{a} | 393-411 |

Resistance gene: tetB

| | | | |
|---|---|---|---|
| 1966 | 5′-CAT GCC AGT CTT GCC AAC G | 1970^{a} | 66-84 |
| 1967^{b} | 5′-CAG CAA TAA GTA ATC CAG CGA TG | 1970^{a} | 242-264 |
| 1968 | 5′-GGA GAG ATT TCA CCG CAT AG | 1970^{a} | 457-476 |
| 1969^{b} | 5′-AGC CAA CCA TCA TGC TAT TCC A | 1970^{a} | 721-742 |

Resistance gene: tetM

| | | | |
|---|---|---|---|
| 1586 | 5′-ATT CCC ACA ATC TTT TTT ATC AAT AA | 1590^{a} | 361-386 |
| 1587^{b} | 5′-CAT TGT TCA GAT TCG GTA AAG TTC | 1590^{a} | 501-524 |
| 1588 | 5′-GTT TTT GAA GTT AAA TAG TGT TCT T | 1590^{a} | 957-981 |
| 1589^{b} | 5′-CTT CCA TTT GTA CTT TCC CTA | 1590^{a} | 1172-1192 |

Resistance gene: vatB

| | | | |
|---|---|---|---|
| 1609 | 5′-GCC CTG ATC CAA ATA GCA TAT A | 1613^{a} | 11-32 |
| 1610^{b} | 5′-CCT GGC ATA ACA GTA ACA TTC TG | 1613^{a} | 379-401 |
| 1611 | 5′-TGG GAA AAA GCA ACT CCA TCT C | 1613^{a} | 301-322 |
| 1612^{b} | 5′-ACA ACT GAA TTC GCA GCA ACA AT | 1613^{a} | 424-446 |

Resistance gene: vatC

| | | | |
|---|---|---|---|
| 1614 | 5′-CCA ATC CAG AAG AAA TAT ACC C | 1618^{a} | 26-47 |
| 1615^{b} | 5′-ATT AGT TTA TCC CCA ATC AAT TCA | 1618^{a} | 177-200 |
| 1616 | 5′-ATA ATG AAT GGG GCT AAT CAT CGT AT | 1618^{a} | 241-266 |
| 1617^{b} | 5′-GCC AAC AAC TGA ATA AGG ATC AAC | 1618^{a} | 463-486 |

Resistance gene: vga

| | | | |
|---|---|---|---|
| 1619 | 5′-AAG GCA AAA TAA AAG GAG CAA AGC | 1623^{a} | 641-664 |
| 1620^{b} | 5′-TGT ACC CGA GAC ATC TTC ACC AC | 1623^{a} | 821-843 |
| 1621 | 5′-AAT TGA AGG ACG GGT ATT GTG GAA AG | 1623^{a} | 843-868 |
| 1622^{b} | 5′-CGA TTT TGA CAG ATG GCG ATA ATG AA | 1623^{a} | 975-1000 |

Resistance gene: vgaB

| | | | |
|---|---|---|---|
| 1624 | 5′-TTC TTT AAT GCT CGT AGA TGA ACC TA | 1628^{a} | 354-379 |
| 1625^{b} | 5′-TTT TCG TAT TCT TCT TGT TGC TTT C | 1628^{a} | 578-602 |
| 1626 | 5′-AGG AAT GAT TAA GCC CCC TTC AAA AA | 1628^{a} | 663-688 |
| 1627^{b} | 5′-TTA CAT TGC GAC CAT GAA ATT GCT CT | 1628^{a} | 849-874 |

Resistance genes: vgb, vgh

| | | | |
|---|---|---|---|
| 1629 | 5′-AAG GGG AAA GTT TGG ATT ACA CAA CA | 1633^{a} | 73-98 |
| 1630^{b} | 5′-GAA CCA CAG GGC ATT ATC AGA ACC | 1633^{a} | 445-468 |
| 1631 | 5′-CGA CGA TGC TTT ATG GTT TGT | 1633^{a} | 576-596 |
| 1632^{b} | 5′-GTT AAT TTG CCT ATC TTG TCA CAC TC | 1633^{a} | 850-875 |

Resistance gene: vgbB

| | | | |
|---|---|---|---|
| 1634 | 5′-TTA ACT TGT CTA TTC CCG ATT CAG G | 1882^{a} | 23-47 |
| 1635^{b} | 5′-GCT GTG GCA ATG GAT ATT CTG TA | 1882^{a} | 267-289 |
| 1636 | 5′-TTC CTA CCC CTG ATG CTA AAG TGA | 1882^{a} | 155-178 |
| 1637^{b} | 5′-CAA AGT GCG TTA TCC GAA CCT AA | 1882^{a} | 442-464 |

Sequencing primers
Resistance gene: gyrA

| | | | |
|---|---|---|---|
| 1290 | 5′-GAY TAY GCI ATG ISI GTI ATH GT | 1299^{a} | 70-83 |
| 1292^{b} | 5′-ARI SCY TCI ARI ATR TGI GC | 1299^{a} | 1132-1152 |
| 1291 | 5′-GCI YTI CCI GAY GTI MGI GAY GG | 1299^{a} | 100-123 |
| 1292^{b} | 5′-ARI SCY TCI ARI ATR TGI GC | 1299^{a} | 1132-1152 |
| 1293 | 5′-ATG GCT GAA TTA CCT CAA TC | 1299^{a} | 1-21 |
| 1294^{b} | 5′-ATG ATT GTT GTA TAT CTT CTT CAA C | 1299^{a} | 2626-2651 |
| 1295^{b} | 5′-CAG AAA GTT TGA AGC GTT GT | 1299^{a} | 1255-1275 |
| 1296 | 5′-AAC GAT TCG TGA GTC AGA TA | 1299^{a} | 1188-1208 |
| 1297 | 5′-CGG TCA ACA TTG AGG AAG AGC T | 1300^{a} | 29-51 |
| 1298^{b} | 5′-ACG AAA TCG ACC GTC TCT TTT TC | 1300^{a} | 415-437 |

Resistance gene: gyrB

| | | | |
|---|---|---|---|
| 1301 | 5′-GTI MGI AWI MGI CCI GSI ATG TA | 1307^{a} | 82-105 |
| 1302^{b} | 5′-TAI ADI GGI GGI KKI GCI ATR TA | 1307^{a} | 1600-1623 |
| 1303 | 5′-GGI GAI GAI DYI MGI GAR GG | 1307^{a} | 955-975 |
| 1304^{b} | 5′-CIA RYT TIK YIT TIG TYT G | 1307^{a} | 1024-1043 |
| 1305 | 5′-ATG GTG ACT GCA TTG TCA GAT G | 1307^{a} | 1-23 |
| 1306^{b} | 5′-GTC TAC GGT TTT CTA CAA CGT C | 1307^{a} | 1858-1888 |

Resistance gene: parC

| | | | |
|---|---|---|---|
| 1308 | 5′-ATG TAY GTI ATI ATG GAY MGI GC | 1320^{a} | 67-90 |
| 1309^{b} | 5′-ATI ATY TTR TTI CCY TTI CCY TT | 1320^{a} | 1993-2016 |
| 1310 | 5′-ATI ATI TSI ATI ACY TCR TC | 1320^{a} | 1112-1132 |
| 1311^{b} | 5′-GAR ATG AAR ATI MGI GGI GAR CA | 1320^{a} | 1288-1311 |
| 1312 | 5′-AAR TAY ATI ATI CAR GAR MGI GC | 1321^{a} | 67-90 |
| 1313^{b} | 5′-AMI AYI CKR TGI GGI TTI TTY TT | 1321^{a} | 2212-2235 |
| 1314 | 5′-TAI GAI TTY ACI GAI SMI CAR GC | 1321^{a} | 1228-1251 |
| 1315^{b} | 5′-ACI ATI GCI TCI GCY TGI KSY TC | 1321^{a} | 1240-1263 |
| 1316 | 5′-GTG AGT GAA ATA ATT CAA GAT T | 1321^{a} | 1-23 |
| 1317^{b} | 5′-CAC CAA AAT CAT CTG TAT CTA C | 1321^{a} | 2356-2378 |
| 1318 | 5′-ACC TAY TCS ATG TAC GTR ATC ATG GA | 1320^{a} | 58-84 |
| 1319^{b} | 5′-AGR TCG TCI ACC ATC GGY AGY TT | 1320^{a} | 832-855 |

Resistance gene: parE

| | | | |
|---|---|---|---|
| 1322 | 5′-RTI GAI AAY ISI GTI GAY GAR G | 1328^{a} | 133-155 |
| 1325^{b} | 5′-RTT CAT YTC ICC IAR ICC YTT | 1328^{a} | 1732-1752 |
| 1323 | 5′-ACI AWR SAI GGI GGI ACI CAY G | 1328^{a} | 829-850 |
| 1324^{b} | 5′-CCI CCI GCI SWR TCI CCY TC | 1328^{a} | 1280-1302 |
| 1326 | 5′-TGA TTC AAT ACA GGT TTT AGA G | 1328^{a} | 27-49 |
| 1327^{b} | 5′-CTA GAT TTC CTC CTC ATC AAA T | 1328^{a} | 1971-1993 |

^{a}Sequence from databases.
^{b}These sequences are from the complementary DNA strand of the sequence of the originating fragment given in the Sequence Listing.

Annex LI: Internal hybridization probes for specific detection
of antimicrobial agents resistance genes sequences.

Originating
DNA fragment

| | | | |
|---|---|---|---|
| | | SEQ ID | Nucleotide |
| SEQ ID NO. | Nucleotide sequence | NO. | position |

Resistance gene: aph3′VIa

| | | | |
|---|---|---|---|
| 2252 | 5′-CCA CAT ACA GTG TCT CTC | 1406^{a} | 149-166 |

Resistance gene: blaSHV

| | | | |
|---|---|---|---|
| 1886 | 5′-GAC GCC CGC GCC ACC ACT | 1900^{a} | 484-501 |
| 1887 | 5′-GAC GCC CGC GAC ACC ACT A | 1899^{a} | 514-532 |
| 1888 | 5′-GAC GCC CGC AAC ACC ACT A | 1901^{a} | 514-532 |
| 1889 | 5′-GTT CGC AAC TGC AGC TGC TG | 1899^{a} | 593-612 |
| 1890 | 5′-TTC GCA ACG GCA GCT GCT G | 1899^{a} | 594-612 |
| 1891 | 5′-CCG GAG CTG CCG AIC GGG | 1902^{a} | 692-709 |
| 1892 | 5′-CGG AGC TGC CAA RCG GGG | 1903^{a} | 693-710 |
| 1893 | 5′-GGA GCT GGC GAR CGG GGT | 1899^{a} | 694-711 |
| 1894 | 5′-GAC CGG AGC TAG CGA RCG | 1904^{a} | 690-707 |
| 1895 | 5′-CGG AGC TAG CAA RCG GGG T | 1905^{a} | 693-711 |
| 1896 | 5′-GAA ACG GAA CTG AAT GAG GCG | 1899^{a} | 484-504 |
| 1897 | 5′-CAT TAC CAT GGG CGA TAA CAG | 1899^{a} | 366-386 |
| 1898 | 5′-CCA TTA CCA TGA GCG ATA ACAG | 1899^{a} | 365-386 |

Resistance gene: blaTEM

| | | | |
|---|---|---|---|
| 1909 | 5′-ATG ACT TGG TTA AGT ACT CAC C | 1928^{a} | 293-314 |
| 1910 | 5′-ATG ACT TGG TTG AGT ACT CAC C | 1927^{a} | 293-314 |
| 1911 | 5′-CCA TAA CCA TGG GTG ATA ACA C | 1928^{a} | 371-392 |
| 1912 | 5′-CCA TAA CCA TGA GTG ATA ACA C | 1927^{a} | 371-392 |
| 1913 | 5′-CGC CTT GAT CAT TGG GAA CC | 1928^{a} | 475-494 |
| 1914 | 5′-CGC CTT GAT CGT TGG GAA CC | 1927^{a} | 475-494 |
| 1915 | 5′-CGC CTT GAT AGT TGG GAA CC | 1929^{a} | 475-494 |
| 1916 | 5′-CGT GGG TCT TGC GGT ATC AT | 1927^{a} | 712-731 |
| 1917 | 5′-CGT GGG TCT GGC GGT ATC AT | 1930^{a} | 712-731 |
| 1918 | 5′-GTG GGT CTC ACG GTA TCA TTG | 1927^{a} | 713-733 |
| 1919 | 5′-CGT GGG TCT CTC GGT ATC ATT | 1931^{a} | 712-732 |
| 1920 | 5′-CGT GGI TCT CGC GGT ATC AT | 1927^{a} | 712-731 |
| 1921 | 5′-CGT GGG TCT AGC GGT ATC ATT | 1932^{a} | 713-733 |
| 1922 | 5′-GTT TTC CAA TGA TTA GCA CTT TTA | 1927^{a} | 188-211 |
| 1923 | 5′-GTT TTC CAA TGA TAA GCA CTT TTA | 1927^{a} | 188-211 |
| 1924 | 5′-GTT TTC CAA TGC TGA GCA CTT TT | 1932^{a} | 188-210 |
| 1925 | 5′-CGT TTT CCA ATG ATG AGC ACT TT | 1927^{a} | 187-209 |
| 1926 | 5′-GTT TTC CAA TGG TGA GCA CTT TT | 1933^{a} | 188-210 |
| 2006 | 5′-TGG AGC CGG TGA GCG TGG | 1927^{a} | 699-716 |
| 2007 | 5′-TGG AGC CAG TGA GCG TGG | 2010^{a} | 699-716 |
| 2008 | 5′-TCT GGA GCC GAT GAG CGT G | 1929^{a} | 697-715 |
| 2009 | 5′-CTG GAG CCA GTA AGC GTG G | 2011^{a} | 698-716 |
| 2141 | 5′-CAC CAG TCA CAG AAA AGC | 1927^{a} | 311-328 |

Resistance gene: dhfrIa

| | | | |
|---|---|---|---|
| 2253 | 5′-CAT TAC CCA ACC GAA AGT A | 1461^{a} | 158-176 |

Resistance gene: embB

| | | | |
|---|---|---|---|
| 2104 | 5′-CTG GGC ATG GCI CGA GTC | 2105^{a} | 910-927 |

Resistance gene: gyrA

| | | | |
|---|---|---|---|
| 1333 | 5′-TCA TGG TGA CTT ATC TAT TTA TG | 1299^{a} | 240-263 |
| 1334 | 5′-CAT CTA TTT ATA AAG CAA TGG TA | 1299^{a} | 251-274 |
| 1335 | 5′-CTA TTT ATG GAG CAA TGG T | 1299^{a} | 254-273 |
| 1940 | 5′-GTA TCG TTG GTG ACG TAA T | 1299^{a} | 206-224 |
| 1943 | 5′-GCT GGT GGA CGG CCA G | 1954^{a} | 279-294 |
| 1945 | 5′-CGG CGA CTA CGC GGT AT | 1954^{a} | 216-232 |
| 1946 | 5′-CGG CGA CTT CGC GGT AT | 1954^{a} | 216-232 |
| 1947 | 5′-CGG TAT ACG GCA CCA TCG T | 1954^{a} | 227-245 |
| 1948 | 5′-GCG GTA TAC AAC ACC ATC G | 1954^{a} | 226-244 |
| 1949 | 5′-CGG TAT ACG CCA CCA TCG T | 1954^{a} | 227-245 |
| 2042 | 5′-CAC GGG GAT TTC TCT ATT TA | 2054^{a} | 103-122 |
| 2043 | 5′-CAC GGG GAT TAC TCT ATT TA | 2054^{a} | 103-122 |

Resistance gene: inhA

| | | | |
|---|---|---|---|
| 2100 | 5′-GCG AGA CGA TAG GTT GTC | 2101^{a} | 1017-1034 |

Resistance gene: parC

| | | | |
|---|---|---|---|
| 1336 | 5′-TGG AGA CTA CTC AGT GT | 1321^{a} | 232-249 |
| 1337 | 5′-TGG AGA CTT CTC AGT GT | 1321^{a} | 232-249 |
| 1338 | 5′-GTG TAC GGA GCA ATG | 1321^{a} | 245-260 |
| 1339 | 5′-CCA GCG GAA ATG CGT | 1321^{a} | 342-357 |
| 1941 | 5′-GCA ATG GTC CGT TTA AGT | 1321^{a} | 253-270 |
| 1944 | 5′-TTT CGC CGC CAT GCG TTA C | 1781 | 247-265 |
| 1950 | 5′-GGC GAC ATC GCC TGC | 1781 | 137-151 |
| 1951 | 5′-GGC GAC AGA GCC TGC TA | 1781 | 137-153 |
| 1952 | 5′-CCT GCT ATG GAG CGA TGG T | 1781 | 147-165 |
| 1953 | 5′-CGC CTG CTA TAA AGC GAT GGT | 1781 | 145-165 |
| 2046 | 5′-ACG GGG ATT TTT CTA TCT AT | 2055^{a} | 227-246 |

Resistance gene: rpoB

| | | | |
|---|---|---|---|
| 2067 | 5′-AGC TGA GCC AAT TCA TGG | 2072^{a} | 1304-1321 |
| 2068 | 5′-ATT CAT GGA CCA GAA CAA C | 2072^{a} | 1314-1332 |
| 2069 | 5′-CGC TGT CGG GGT TGA CCC | 2072^{a} | 1334-1351 |
| 2070 | 5′-GTT GAC CCA CAA GCG CCG | 2072^{a} | 1344-1361 |
| 2071 | 5′-CGA CTG TCG GCG CTG GGG | 2072^{a} | 1360-1377 |

Resistance gene: tetM

| | | | |
|---|---|---|---|
| 2254 | 5′-ACC TGA ACA GAG AGA AAT G | 1590^{a} | 1062-1080 |

^{a}Sequence from databases.

Annex LII: Molecular beacon internal hybridization probes for
specific detection of atpD sequences.

Originating DNA fragment

| | | | |
|---|---|---|---|
| | | SEQ ID | Nucleotide |
| SEQ ID NO. | Nucleotide sequence^{a} | NO. | position |

Bacterial species: Bacteroides fragilis

| | | | |
|---|---|---|---|
| 2136 | 5′-CCA ACG CGT CCT CAA TCA TTT CTA ACT TCT | 929 | 353-382 |
| | ATG GCC GGC GTT GG | | |

Bacterial species: Bordetella pertussis

| | | | |
|---|---|---|---|
| 2182 | 5′-GCG CGC CAA CGA CTT CTA CCA CGA AAT GGA | 1672 | 576-605 |
| | AGA GTC GCG CGC | | |

Bacterial group: Campylobacter jejuni and C. coli

| | | | |
|---|---|---|---|
| 2133 | 5′-CCA CGC ACA WAA ACT TGT TTT AGA AGT | 1576, | 44-73^{d} |
| | AGC AGC WCA GCG TGG | 1600, 1849, | |
| | | 1863, 2139^{b,c} | |

Fungal species: Candida glabrata

| | | | |
|---|---|---|---|
| 2078 | 5′-CCG AGC CTT GGT CTT CGG CCA AAT GAA CGC | 463 | 442-463 |
| | TCG G | | |

Fungal species: Candida krusei

| | | | |
|---|---|---|---|
| 2075 | 5′-CCG AGC CAG GTT CTG AAG TCT CTG CAT TAT | 468 | 720-748 |
| | TAG GTG CTC GG | | |

Fungal species: Candida lusitaniae

| | | | |
|---|---|---|---|
| 2080 | 5′-CCG AGC CGA AGA GGG CCA AGA TGT CGC TCG G | 470 | 520-538 |

Fungal species: Candida parapsilosis

| | | | |
|---|---|---|---|
| 2079 | 5′-CCG AGC GTT CAG TTA CTT CAG TCC AAG CCG | 472 | 837-860 |
| | GCT CGG | | |

Fungal species: Candida tropicalis

| | | | |
|---|---|---|---|
| 2077 | 5′-CCG AGC AAC CGA TCC AGC TCC AGC TAC GCT | 475 | 877-897 |
| | CGG | | |

Bacterial species: Klebsiella pneumoniae

| | | | |
|---|---|---|---|
| 2281 | 5′-CCC CCA GCT GGG CGG CGG TAT CGA TGG GGG | 317 | 40-59 |

^{a}Underlined nucleotides indicate the molecular beacon's stem.
^{b}Sequence from databases.
^{c}These sequences were aligned to derive the corresponding primer.
^{d}The nucleotide positions refer to the C. jejuni atpD sequence
fragment (SEQ ID NO. 1576).

Originating DNA fragment

| | | | |
|---|---|---|---|
| | | SEQ ID | Nucleotide |
| SEQ ID NO. | Nucleotide sequence^{a} | NO. | position |

Fungal genus: Candida sp.

| | | | |
|---|---|---|---|
| 2076 | 5′-CCG AGC YGA YAA CAT TTT CAG ATT CAC CCA | 460-478, | 697-723^{c} |
| | RGC GCT CGG | 663^{b} | |

^{a}Underlined nucleotides indicate the molecular beacon's stem.
^{b}These sequences were aligned to derive the corresponding primer.
^{c}The nucleotide positions refer to the C. albicans atpD sequence
fragment (SEQ ID NO. 460).

Annex LIII: Internal hybridization probes for
specific detection of atpD sequences.

| | | Originating | |
|---|---|---|---|
| | | DNA fragment | |
| SEQ | | SEQ ID | Nucleotide |
| ID NO. | Nucleotide sequence | NO. | position |

Bacterial species: Acinetobacter baumannii

| | | | |
|---|---|---|---|
| 2169 | 5′-CCC GTT TGC GAA AGG TGG | 243 | 304-321 |

Bacterial species: Klebsiella pneumoniae

| | | | |
|---|---|---|---|
| 2167 | 5′-CAG CAG CTG GGC GGC GGT | 317 | 36-53 |

Annex LIV: Internal hybridization probes for
specific detection of ddl and mtl sequences.

| | | Originating | |
|---|---|---|---|
| | | DNA fragment | |
| | | | Nucleo- |
| SEQ | | SEQ ID | tide |
| ID NO. | Nucleotide sequence | NO. | position |

Bacterial species: Enterococcus faecium (ddl)

| | | | |
|---|---|---|---|
| 2286 | 5′-AGT TGC TGT ATT AGG AAA TG | 2288^{a} | 784-803 |
| 2287 | 5′-TCG AAG TTG CTG TAT TAG GA | 2288^{a} | 780-799 |

Bacterial species: Enterococcus faecalis mtl)

| | | | |
|---|---|---|---|
| 2289 | 5′-CAC CGA AGA AGA TGA AAA AA | 1243^{a} | 264-283 |
| 2290 | 5′-TGG CAC CGA AGA AGA TGA | 1243^{a} | 261-278 |
| 2291 | 5′-ATT TTG GCA CCG AAG AAG A | 1243^{a} | 257-275 |

^{a}Sequence from databases.

1. A composition for the detection of a vancomycin resistant pathogen in a sample using a nucleic acid amplification assay, wherein said composition comprises a primer pair for the amplification of vanA sequences, said primer pair comprising a forward and a reverse oligonucleotides, wherein said forward and reverse oligonucleotides are between 13 and 30 nucleotides, and wherein said forward and reverse oligonucleotides each comprises a binding region that is complementary to primer binding sites present on opposite strands of the pathogen's DNA, wherein said primer pair is adapted to amplify a target region of a vancomycin resistance gene of said pathogen's DNA between and including said primer binding sites to produce a detectable vanA vancomycin amplification product, wherein at least one of said oligonucleotides comprises, or is fully complementary to, at least 11 consecutive nucleotides of SEQ ID NO: 1090 and SEQ ID NO: 1091, or the complements thereof.

2. (canceled)

3. (canceled)

4. The composition of claim 1, further comprising at least one internal hybridization probe, wherein said internal hybridization probe can hybridize under stringent conditions to said vanA vancomycin amplification product.

5. The composition of claim 4, wherein said internal hybridization probe is a molecular beacon.

6. The composition of claim 4, wherein said internal hybridization probe comprises at least 10 consecutive nucleotides of SEQ ID NO: 2299.

7. (canceled)

8. The composition of claim 4, further comprising:
an internal control DNA; and
an internal control probe,
wherein said internal control DNA is amplified using the said forward and reverse oligonucleotides to produce a control amplification product in said nucleic acid amplification assay,
and wherein said internal control probe hybridizes to said internal control DNA under the same conditions as said internal hybridization probe hybridizes to said vancomycin amplification product.

9. The composition of claim 8, wherein said internal control probe comprises at least 10 consecutive nucleotides of the sequence of SEQ ID NO: 2301.

10. A kit comprising the composition of claim 1.

11. A method to detect the presence of vancomycin-resistant organisms in a sample comprising nucleic acids, comprising:
annealing the nucleic acids of said sample with the composition of claim 4;
amplifying said sample nucleic acids with said annealed primer pair; and
determining the amount of internal hybridization probe that is annealed to the vanA vancomycin amplification product and the target region.

12. The method of claim 11, wherein said primer pair consists of SEQ ID NO's 1090 and 1091, or the complements thereof.

13. The method of claim 11, wherein said primer pair and said internal hybridization probe are placed in the same physical enclosure.

14. (canceled)

15. The method of claim 11 wherein amplification step comprises a method selected from the group consisting of:
(a) polymerase chain reaction (PCR),
(b) ligase chain reaction,
(c) nucleic acid sequence-based amplification,
(d) self-sustained sequence replication,
(e) strand displacement amplification,
(f) branched DNA signal amplification,
(g) nested PCR, and
(h) multiplex PCR.

16. The method of claim 15, wherein said amplification step comprises PCR.

17. (canceled)

18. The method of claim 11, wherein said internal hybridization probe comprises at least 10 consecutive nucleotides of the sequence of SEQ ID NO: 2299.

19. The composition of claim 1, wherein said forward or said reverse oligonucleotide consists of SEQ ID NO: 1090.

20. The composition of claim 1, wherein said forward or said reverse oligonucleotide consists of SEQ ID NO: 1091.

21. The composition of claim 1, wherein said forward and reverse oligonucleotides consist of SEQ ID NO: 1090 and SEQ ID NO: 1091, respectively.

22. The composition of claim 21, further comprising an internal hybridization probe, wherein said internal hybridization probe can hybridize under stringent conditions to said vancomycin amplification product.

23. The composition of claim 22, wherein said internal hybridization probe is a molecular beacon.

24. The composition of claim 22, wherein said internal hybridization probe comprises at least 10 consecutive nucleotides of the sequence of SEQ ID NO: 2299.

25. The composition of claim 22, further comprising:
an internal control DNA; and
an internal control probe,
wherein said internal control DNA is amplified under the same conditions and using said forward and reverse primers to produce a control amplification product, and wherein said internal control probe hybridizes to said internal control DNA under the same conditions as said internal hybridization probe hybridizes to said vanA vancomycin amplification product.

26. The composition of claim 25, wherein said internal control DNA is SEQ ID NO: 2302.

27. The composition of claim 25, wherein said internal control probe comprises at least 10 consecutive nucleotides of the sequence of SEQ ID NO: 2301.

28. The composition of claim 8, wherein said internal control DNA is SEQ ID NO: 2302.

29. The composition of claim 1, further comprising a second amplification primer pair for the amplification of vanB sequences, said second primer pair comprising a second forward and a second reverse oligonucleotide, wherein said second forward and second reverse oligonucleotides are each between 13 and 30 nucleotides and wherein each of said forward and reverse oligonucleotides comprises a binding region that is complementary to primer binding sites present on opposite strands of the pathogen's DNA, wherein said primer pair is adapted to amplify a vancomycin resistance gene of said pathogen's DNA between and including said primer binding sites to produce a detectable vanB vancomycin amplification product, wherein at least one of said oligonucleotides of said second primer pair is selected from the group consisting of: SEQ ID NO: 1095 and SEQ ID NO: 1096, or the complements thereof.

30. The composition of claim 29, wherein said second forward and second reverse oligonucleotides of said second primer pair consist of SEQ ID NO: 1095 and SEQ ID NO: 1096, respectively.

31. The composition of claim 29 further comprising an internal hybridization probe, wherein said internal hybridization probe can hybridize under stringent conditions to said vanA vancomycin amplification product or said vanB vancomycin amplification product.

32. The composition of claim 31, wherein said internal hybridization probe is a molecular beacon.

33. The composition of claim 31, wherein said internal hybridization probe comprises at least 10 consecutive nucleotides of the sequence of SEQ ID NO: 2299.

34. The composition of claim 31, wherein said internal hybridization probe comprises at least 10 consecutive nucleotides of the sequence of SEQ ID NO: 2300.

35. The composition of claim 29, further comprising:
an internal control DNA; and
an internal control probe,
wherein said internal control DNA is amplified under the same conditions and using the same forward and reverse oligonucleotides to produce a control amplification product, and wherein said internal control probe hybridizes to said internal control DNA under the same conditions as said internal hybridization probe hybridizes to said vanA or vanB vancomycin amplification product.

36. The composition of claim 36, wherein said internal control DNA comprises SEQ ID NO: 2302.

37. The composition of claim 36, wherein said internal control probe comprises at least 10 consecutive nucleotides of the sequence of SEQ ID NO: 2301.

38. The method of claim 11, further comprising annealing the sample nucleic acids with:
an internal control DNA; and
an internal control probe,
wherein said internal control DNA is amplified under the same conditions and using the same forward and reverse oligonucleotides as to produce a control amplification product, and wherein said internal control probe hybridizes to said internal control DNA under the same conditions as said internal hybridization probe hybridizes to said vanA vancomycin amplification product.

39. The method of claim 38, wherein said internal control probe comprises at least 10 consecutive nucleotides of the sequence of SEQ ID NO: 2301.

40. The method of claim 38, wherein said internal control DNA comprises of SEQ ID NO: 2302.

The application's sequence listing, which the Patent Office published only in electronic form, follows.

SEQUENCE LISTING (2302 sequences)

SEQ ID NO: 1 - DNA, 750 bp, Acinetobacter baumannii ATCC 19606
caaactcgtgagcacatccttctttctcgtcaggtaggtgtaccttacatcatcgtattcttaaacaaatgcgaccttgttgatgacgaagaattacttgaattagtagaaatggaagtacgtgaacttctttctacttatgacttcccaggtgatgacactccagtaatccgtggttcagctcttgcagcgcttaacggtgaagctggtccttacggtgaagaatcagttcttgctcttgtagcagcacttgactcttacatcccagagccagagcgtgcaatcgacaaagcattcttgatgccaatcgaagacgtattctcaatttctggtcgtggtacagtagtaacaggccgtgttgaagctggtatcatcaaagttggtgaagaagtagagatcgttggtattaaagatacagttaaaacaactgtaactggcgtagaaatgttccgtaaacttcttgacgaaggccgtgcaggtgagaactgtggtatcttacttcgtggtactaagcgtgaagaagtacaacgtggtcaagtacttgctaaaccaggtacaatcaagccgcacactaaattcgacgcagaagtatacgtactttctaaagaagaaggtggtcgtcacactccattcttaaatggttaccgtccacagttctacttccgtacaactgacgtaactggtgcratccagttgaaagaaggcgttgaaatggtaatgccaggtgacaacgttgaaatgtcagtagaa

SEQ ID NO: 2 - DNA, 826 bp, Actinomyces meyeri ATCC 35568
cggtgcgatcctcgtggtcgccgcgaccgacggccccatggcccagacccgcgagcacgtcctgctcgcccgtcaggtcggcgttcccaccatcctcatcgccctcaacaagtccgacatggttgacgacgaggaaatgatggaactggtcgaggaggagtgccgcgacctgctggagtcccaggacttcgatcgcgatgccccgatcgtccaggtttccgctctgaaggccctcgagggcgacgcggagtgggttgccaagatcgaggagctcatggaggctgtggattcctacatccccacccccgagcgcgatatggacaagcccttcctcatgccgatcgaggacgtcttcacgatcacaggtcgtggcacggtcgtcacggggcgtgttgagcgtggcaagctgccgatcaactccgaggtcgagatcctcggtatccgtgatccccagaagaccacggtcaccggcatcgagatgttccacaagtcgatggacgaggcatgggccggcgagaactgtggcctgctgctgcgcggtaccaagcgcgatgaggttgagcgcggccaggttgtggccattcccggctccatcacgcctcacaccgagttcgagggccaggtttacatcctcaagaaggaagagggcggccgtcacaacccgttcttctcgaactaccgtccgcagttctacttccgtaccacggacgtgaccggcgtcatcaccctccccgagggcaccgacatggtcatgcctggcgacaccaccgagatctccgttcagctgatccagcccatcgccatggagcccggctgggcttcgcca

SEQ ID NO: 3 - DNA, 835 bp, Aerococcus viridans ATCC 11563
tggtgcgatcttagtagtatctgctgctgatggtccaatgccacaaactcgtgagcacatccttttagctggccaaatcggtgttcctgcattcgtagtattcttaaacaaagttgaccaagttgacgatgaagaattactagaattagttgaaatggaagttcgtgacttattatctgagtacaactacccaggtgacgatctacctgtaatcgctggttctgctttattagcattacaaggcgatgaagctcaagaagctaaaatcatggaattaatggaagctgtagactcttacattccagaaccagaacgtgacaacgacaaaccattcatgatgccaattgaggatgtattctcaatcactggtcgtggtactgttgctacaggtcgtgttgaacgtggtgaagttcgtacaggtgacgaagttgacatcgttggtattgctgaacaaatcggtaaatcagttgtaactggtgttgaaatgttccgtaaaaacttagactacgctcaagctggtgacaacatcggtgcattattacgtggtgttcaacgtgaagacatccaacgtggtcaagtattggctgctcctggttcaatcactccacatactaaatttaaagcgcaagtttacgttttatctaaagaagaaggtggacgtcatacaccattcttaactaactaccgtccacaattctacttccgtactactgacattactggtgttatcactttaccagaagacgtagctatggttatgcctggtgacaacgttgatatggacgttgaattgattcacccagttgcgatcgaagatggtactaaattctctatc

SEQ ID NO: 4 - DNA, 827 bp, Achromobacter xylosoxidans subsp. denitrificans ATCC 15173
cctggtggtgtcggccgctgacggcccgatgccgcaaacgcgcgaacacatcctgctgagccgccaggttggcgtgccgtacatcatcgtcttcctgaacaaggccgacatggttgacgacgccgagctgcttgagctggtggaaatggaagttcgcgarctgctgagcaagtacgacttcccgggcgacgacaccccgatcgtgaagggttcggccaagctggcgctggaaggcgacaagggcgaactgggcgaacaggccatcatggcgctggccgctgcgctggactcgtacatcccgacgcctgagcgtgccgttgacggcgcgttcctgatgccggttgaagacgtgttctcgatctcgggtcgcggcaccgtggtgaccggccgtatcgaacgcggcatcatcaaggtcggcgaggaaatcgaaatcgtcggtctggtgccgacggtgaagacgacctgcacgggcgtggaaatgttccgcaagctgctggaccaaggtcaagccggcgacaacgtgggcatcctrctgcgcggcaccaagcgtgaagacgtccagcgcggccaggttctggccaagccgggctcgatcaccccgcacacggacttcacgtccgaggtgtacatcctgtccaaggaagaaggcggccgtcacactccgttcttccaaggctatcgtccccagttctacttccgcacgacggacgtgacgggcacgatcgagctgccggccgacaaggaaatggtcctgccgggcgacaacgtggccatgacggtcaagctgctggctccgatcgccatggaagaaggcctgcgttcgccac

SEQ ID NO: 5 - DNA, 823 bp, Anaerorhabdus furcosus ATCC 25662
tggatcaatcctagtagttgctgcaactgatggaccaatgcctcaaactcgtgaacatatcttacttgctcgtcaagtaggtgttccaagaatggttgtattcttgaacaaatgcgacatggttgaagatgaagaattaatcgaccttgttgaaatggaagttcgtgaacttctaagtgcttacggtttcgaaggtgatgatacaccagttatccgtggttctgcattaaaatctcttgaaggaaatgctgattgggaagcaaaagttgctgaattaatggatgcagttgactcttggattccaactccaactcatgaaacagacaaaccattcttaatggctgttgaagatgtattcacaattacaggtcgtggtacagttgctactggacgtgttgaacgtggacacttaaaccttaacgaagaagttgaaatcgttggtattcatgatactaagaaatcagttgttactggtatcgaaatgttccgtaaattattagactatgctgaagcaggagacaacattggtgcattattacgtggtgtttctcgtgatgaaatcgaacgtggacaatgtctagctaaacctggatcagttactccacatacagctttcaaagctcaagtatacgtattaactaaagaagaaggtggacgtcatacaccattcgtaactaactaccgtcctcaattctatttccgtacaactgacgtaacaggagttgttaaacttcctgaaggtactgaaatggttatgcctggagacaacatcgaaatgatcgttgaattaatcgctccaatcgctgttgaacaaggaactaag

SEQ ID NO: 6 - DNA, 825 bp, Bacillus anthracis strain 4229
cggcggtatcttagtagtatctgctgctgatggcccaatgcctcaaactcgtgagcacatccttctttctcgtcaagtaggtgtaccttacatcgttgtattcttaaacaaatgcgacatggtagacgacgaagaattattagaattagtagaaatggaagttcgcgacctattatctgaatacggattcccaggcgacgacattcctgtaatcaaaggttctgctcttaaagctcttcaaggagaagctgattgggaagcaaaaatcattgaattaatggctgaagttgatgcttacatcccaactccagaacgtgaaactgacaaaccattcttaatgcctgtagaggacgtattctctatcacaggtcgtggtacagttgctactggtcgtgttgagcgcggtatcgttaaagttggtgacgtagtagaaatcatcggtcttgctgaagaaaatgcttctacaactgtaactggtgtagagatgttccgtaaacttcttgaccaagctcaagctggagacaacatcggtgctttacttcgtggggttgctcgtgaagacatccaacgtggacaagtacttgcaaaaagcggttctgtaaaagctcacgctaaattcaaagctgaagttttcgtattatctaaagaagaaggtggacgtcacactccattcttcgctaactaccgtcctcagttctacttccgtacaactgacgtaactggtatcatccaattaccagaaggtactgaaatggtaatgcctggtgacaacatcgaaatgactatcgaacttatcgctccaatcgctatcgaagagggaactaa

SEQ ID NO: 7 - DNA, 829 bp, Bacillus cereus ATCC 14579
cggcggtatcttagtagtatctgctgctgatggcccaatgcctcaaacacgtgagcacatccttctttctcgtcaagtaggtgttccttacatcgttgtattcttaaacaaatgcgacatggtagatgacgaagaattattagaattagtagaaatggaagttcgcgacctattatctgaatacggattcccaggcgacgacattcctgtaatcaaaggttctgctcttaaagctcttcaaggagaagctgattgggaagcaaaaatcattgaattaatggctgaagttgatgcttacatcccaactccagaacgtgaaactgacaaaccattcttaatgcctgtagaggacgtattctctatcacaggtcgtggtacagttgctactggtcgtgttgagcgcggtatcgttaaagttggtgacgtagtagaaatcatcggtcttgctgaagaaaatgcttctacaactgtaactggtgtagagatgttccgtaaacttcttgaccaagctcaagctggagacaacatcggtgctttacttcgtggggttgctcgtgaagacatccaacgtggacaagtacttgcaaaaagcggttctgtaaaagctcacgctaaattcaaagctgaagttttcgtattatctaaagaagaaggtggacgtcacactccattcttcgctaactaccgtcctcagttctacttccgtacaactgacgtaactggtatcatccaattaccagaaggtactgaaatggtaatgcctggtgacaacattgaaatgactatcgaacttatcgctccaatcgctatcgaagagggaactaaattc

SEQ ID NO: 8 - DNA, 818 bp, Bacteroides distasonis ATCC 8503
cggtgctatcatcgtagttgctgctactgatggtcctatgcctcaaactcgcgagcacatccttttggctcgtcaggtaaacgttccgagattggttgtattcatgaacaagtgtgacatggttgacgacgaggaaatgttggaattggttgagatggagatgagagagttgctttcattctatcaattcgacggtgacaacactccgatcatccgtggttctgctcttggtgcattgaacggtgatgctcaatgggaagataaagtaatggagttgatggaagcttgtgatacttggattcctctgcctccgcgcgaaatcgacaagccgttcttgatgccggttgaggacgtattctcaatcacgggtcgtggtactgttgctacaggtcgtatcgagacaggtattgttaaggttggtgaggaagttcagatcatcggtcttggcgctgctggtaagaaatctgttgttacaggtgttgagatgttccgtaagttattggatcaaggtgaggctggtgataacgttggtttgttgcttcgcggtatcgataagaatgagatcaagcgtggtatggtaatctgccacccgggtcaggttaaagagcattctaagttcaaggctgaggtttatatcttgaagaaagaggaaggtggtcgtcacactccgttccacaacaaatatcgtcctcagttctatatccgtacattggatgtaactggtgagatcactttgccggaaggaactgaaatggtaatgccgggtgataacgtaacgatcgaggttgagttgatctatccggtagcatgtagcgtag

SEQ ID NO: 9 - DNA, 639 bp, Enterococcus casseliflavus strain R763
ggtcctatgcctcaaacacgtgaacacatcttgttatcacgtaacgttggtgtaccatacatcgttgttttcttaaacaaaatggatatggttgatgacgaagaattactagaattagttgaaatggaagttcgtgacttattgtcagaatatgacttcccaggcgacgatgttcctgtaatcgctggttctgctttgaaagctcttgaaggcgatgcttcatacgaagaaaaaatcatggaattaatggctgcagttgacgaatacgttccaactccagaacgtgacactgacaaaccattcatgatgccagtcgaagacgtattctcaatcactggacgtggtactgttgctacaggccgtgttgaacgtggacaagttcgcgttggtgacgaagttgaaatcgttggtattgctgaagaaactgctaaaacaactgtaactggtgttgaaatgttccgtaaattgttagactatgctgaagcaggggataacattggtgcattgctacgtggtgttgctcgtgaagacatccaacgtggacaagtattggctaaagctggtacaatcacacctcatacaaaatttaaagctgaagtttacgttttaacaaaagaagaaggtggacgtcacacacca

SEQ ID NO: 10 - DNA, 692 bp, Staphylococcus saprophyticus strain CSG 197
gaacacattcttttatcacgtaacgttggtgttccagcattagttgtattcttaaacaaagttgacatggttgacgatgaagaattattagaattagtagaaatggaagttcgtgacttattaagcgaatatgacttcccaggtgacgatgtacctgtaatctctggttctgcattaaaagctttagaaggcgacgctgactatgagcaaaaaatcttagacttaatgcaagctgttgatgacttcattccaacaccagaacgtgattctgacaaaccattcatgatgccagttgaggacgtattctcaatcactggtcgtggtactgttgctacaggccgtgttgaacgtggtcaaatcaaagtcggtgaagaaatcgaaatcatcggtatgcaagaagaatcaagcaaaacaactgttactggtgtagaaatgttccgtaaattattagactacgctgaagctggtgacaacattggtgcattattacgtggtgtttcacgtgatgacgtacaacgtggtcaagttttagctgctcctggtactattacaccacatacaaaattcaaagcggatgtttacgttttatctaaagatgaaggtggtcgtcatacaccattcttcactaactaccgcccacaattctatttccgtactactgacgtaactggtgttgttaacttaccagaagg

SEQ ID NO: 11 - DNA, 821 bp, Bacteroides ovatus ATCC 8483
cggtgctatcatcgtttgtgctgcaactgatggtccgatgcctcaaactcgcgaacacattctgttagctcgtcaggtaaacgtacctcgtctggttgtattcttgaacaaatgcgatatggtagacgacgaagaaatgttggaactcgttgaaatggaaatgagagaactcctttcattctatgatttcgatggtgacaatactcctatcatccgtggttctgctcttggcgcattgaacggtgttgaaaaatgggaagacaaagttatggaactgatggatgcagttgataactggattccactgcctccgcgcgatgttgataaaccattcttgatgccggttgaagacgtgttctctatcacaggtcgtggtactgtagcaacaggtcgtatcgaaacaggtgtcatccacgttggtgatgaagtcgaaattcttggtttaggtgaagataagaaatcagttgtaactggtgttgaaatgttccgtaaactgttggatcaaggtgaagctggtgacaacgtaggtcttttgcttcgtggtattgacaagaacgaaatcaaacgtggtatggttctttgtaaaccaggtcagattaaaccgcactctaaattcaaagctgaggtttatatcttgaagaaagaagaaggtggtcgtcacactccgttccacaacaaataccgtcctcagttctacttgcgtactatggactgtacaggtgaaatcactttgccggaaggaacagaaatggtaatgccgggtgataacgtaactattacagttgagttgatttacccagtagcattgaacccgggcttcg

SEQ ID NO: 12 - DNA, 838 bp, Bartonella henselae ATCC 49882
tggtgcgattttggttgtttcagctgctgatggtccgatgcctcaaacacgtgagcatattcttcttgcccgtcaggttggtgttccagcgattgttgtttttcttaataaggttgatcaggttgatgatgctgagcttttggagcttgttgagcttgaagttcgggagttattgtcgaaatatgattttccaggagacgatattccgatcgttaaaggttctgctttggcagcgcttgaagataaagataaaagcattggtgaagatgcggttcgtcttttgatgagtgaagttgataattatataccgacgcctgaacgtcctgttgatcagccgtttttgatgccaattgaagatgttttttcgatttcgggtcgtggaactgttgtgacgggtcgtgttgagcgtggtgttattaaggttggtgaagaagttgagattatcggcattcgtccaacttctaagacaacagttacaggggttgaaatgttccgcaagcttttagatcaggggcaagcgggtgataatattggagcgctgcttcgtggtattgatcgtgaagggattgagcgtggacaagttttggcgaagcctgcttcggttacacctcatacgagatttaaagcagaggcttacattttgacgaaagatgaaggtggtcgtcatactccatttttcacgaattatcgtcctcagttttatttccgtactacggatgtaacgggaattgttacgcttccagaaggtacagagatggttatgcctggtgataatgttgctatggatgtctctctgattgttccaattgccatggaagaaaaacttcgttttgctatc

SEQ ID NO: 13 - DNA, 839 bp, Bifidobacterium adolescentis ATCC 15703
tggcgccatccttgttgtggccgccaccgacggcccgatggctcagacccgcgagcacgtgctgctcgctcgtcaggtgggcgtcccgaagatcctcgtcgctctgaacaagtgcgatatggtcgacgacgacgagctcatcgagctcgttgaggaagaggtccgtgacctcctcgacgaaaatggcttcgatcgcgattgcccggtcatccacgtgtccgcttacggcgcactgcacgatgacgctccggaccacgagaagtgggttgagcagatcaagaagctcatggacgccgtcgatgactacatcccgaccccggtccacgatctggacaagccgttcctgatgccgatcgaagatgtcttcaccatctccggccgtggcaccgtggtgaccggccgtgtcgagcgtggtaagctcccggtcaactccaacgtcgagatcgtcggcatccgtccgacccagaccaccaccgtcacctccatcgagaccttccacaagcagatggacgagtgcgaggctggcgacaacaccggtctgctgctccgcggcatcaaccgtgaccaggtcgagcgtggccaggttctggctgctccgggctccgtgaccccgcacaccaagttcgagggcgaagtctacgtgctgaccaaggacgaaggcggccgtcactcgccgttcttctccaactaccgtccgcagttctacttccgtaccaccgacgtcaccggcgtcatcaccctgccggaaggcgttgagatggtgcagccgggcgatcacgctaccttcggcgttgagctgatccagccgatcgctatggaagagggcctgaccttcgcag

SEQ ID NO: 14 - DNA, 839 bp, Bifidobacterium dentium ATCC 27534
tggcgctatcctcgttgtggccgccaccgacggcccgatggctcagacccgcgagcacgtgctgctcgctcgtcaggtgggcgtgccgcgtatcctcgtcgccctgaacaagtgcgatatggtcgacgacgaagagctcatcgagctcgttgaggaagaggtccgtgacctcctcgacgaaaacggcttcgatcgcgattgcccggtcatccacacctccgcctacggcgcgctgcacgatgacgctccggaccacgacaagtgggttgagtccgtcaaggaactcatgaaggccgtcgacgagtacatcccgaccccgacccacgatctggacaagccgttcctgatgccgatcgaagatgtgttcaccatctccggccgtggcaccgtggttaccggccgtgtcgagcgtggtaagctcccggtcaactccaacgttgagatcgtcggcatccgtccgacccagaccaccaccgtcacctccatcgagaccttccacaagcagatggacgagtgcgaggctggcgacaacaccggtctgctgctccgcggcatcaaccgtgaccaggtcgagcgtggccaggttctggctgctccgggctccgtgaccccgcacaccaagttcgagggcgaagtctacgtgctgaccaaggacgaaggcggccgtcactcgccgttcttctccaactaccgtccgcagttctacttccgtaccaccgacgtcaccggcgtcatcaccctgccggaaggcgttgagatggtgcagccgggcgatcacgctaccttcggcgttgagctgatccagccgatcgctatggaagagggcctgaccttcgcag

SEQ ID NO: 15 - DNA, 838 bp, Brucella abortus strain S2308
tggcgcgatcctggtggtttcggctgctgacggcccgatgccgcagacccgcgagcacatcctgcttgcccgtcaggttggcgttccggcgatcgtcgtgttcctcaacaagtgcgaccaggttgacgatgcagaactgctcgaactggttgaactggaagtgcgcgaacttctgtcgaagtacgaattccccggcgacgaaatcccgatcatcaagggctcggctcttgctgctctggaagattcttccaaggaactgggcgaagatgccatccgcaacctgatggacgcggttgacagctacattccgaccccggaacgcccgatcgaccagccgttcctgatgccgatcgaagacgtgttctcgatctccggccgtggtacggttgtgacgggtcgcgttgagcgcggtatcgttaaggtcggtgaagaagttgaaatcgtcggcatcaaggcgacgacgaagaccacggttaccggcgttgaaatgttccgcaagctgctcgaccagggccaggctggcgacaacattggcgcgctgatccgcggcgttggccgtgaagacgttgaacgcggccaggttctctgcaagccgggttctgtgaagccgcacaccaagtttaaggcagaagcctatattctgaccaaggacgaaggtggccgtcatacgccgttcttcaccaactaccgtccgcagttctacttccgtacgacggacgtgacgggtgttgtgacgcttccggctggcacggaaatggtcatgcctggcgataacgtcgccatggacgttaccctgatcgtgccgatcgccatggaagagaagcttcgcttcgctatc

SEQ ID NO: 16 - DNA, 771 bp, Burkholderia cepacia strain LSPQ 2217
ggcagcagacggcccgatgccgcaaacgcgtgagcacatcctgctggcgcgtcaggttggcgttccgtacatcatcgtgttcctgaacaagtgcgacatggtggacgacgccgaactgctcgagctggtcgagatggaagttcgcgaactcctgtcgaagtacgacttcccgggcgacgacacgccgatcgtgaagggttcggcgaagctggcgctggaaggcgacacgggcgagctgggcgaagtggcgatcatgagcctggccgacgcgctggacacgtacatcccgacgccggagcgtgcagttgacggcgcgttcctgatgccggtggaagacgtgttctcgatctcgggccgcggtacggtggtgacgggtcgtgtcgagcgcggcatcgtgaaggtcggcgaagaaatcgaaatcgtcggtatcaagccgacggtgaagacgacctgcacgggcgttgaaatgttccgcaagctgctggaccaaggtcaagcaggcgacaacgttggtatcctgctgcgcggcacgaagcgtgaagacgtggagcgtggccaggttctggcgaagccgggttcgatcacgccgcacacgcacttcacggctgaagtgtacgtgctgagcaaggacgaaggcggccgtcacacgccgttcttcaacaactaccgtccgcagttctacttccgtacgacggacgtgacgggctcgatcgagctgccgaaggacaaggaaatggtgatgccgggcgacaacgtgtcgatcacggtgaa

SEQ ID NO: 17 - DNA, 829 bp, Cedecea davisae ATCC 33431
ggcgctatcctggttgttgctgcgactgatggcccaatgccacagacccgtgagcacatcctgctgggtcgtcaggttggcgttccgtacatcatcgtgttcctgaacaaatgcgacatggttgatgacgaagagctgctggaactggtagaaatggaagttcgtgaacttctgtcccagtacgacttcccgggcgacgatactccaatcgttcgtggttctgctctgaaagcgctggaaggcgaagcagagtgggaagctaaaatcgttgagctggctggctacctggattcttacatccctgagccagagcgtgctatcgataagccgttcctgctgccaatcgaagacgtattctccatctccggccgtggtaccgttgttaccggtcgtgtagagcgcggtatcatcaaagttggtgaagaagttgaaatcgttggtatcaaagatactgcgaaatctacctgtaccggcgttgaaatgttccgcaaactgctggacgaaggccgtgctggtgagaacgttggtgttctgctgcgtggtatcaaacgtgaagaaatcgaacgtggtcaggtactggctaagccaggctctatcaagccacacaccaagttcgaatctgaagtgtacatcctgtccaaagacgaaggcggccgtcatactccgttcttcaaaggctaccgtccacagttctacttccgtacaactgacgtgaccggcaccatcgaactgccagaaggcgttgagatggtaatgcctggcgacaacatcaaaatggttgttaccctgatccacccaatcgcgatggatgacggtctgcgtttcgcaa

SEQ ID NO: 18 - DNA, 824 bp, Cedecea neteri ATCC 33855
cgctatcctggttgttgctgcgactgacggccctatgcctcagacccgtgagcacatcctgctgggtcgtcaggttggcgttccttacatcatcgtgttcctgaacaaatgtgacatggttgatgacgaagagctgctggagctggttgaaatggaagttcgtgaacttctgtctcagtacgacttcccgggcgatgacactccaatcatccgtggttctgctctgaaagcgctggaaggcgaagcagagtgggaagctaaaatygttgagctggctggcttcctggattcctacatcccagaaccagtacgtgcaatcgayctgccgttcctgctgccaatcgaagacgtattctccatctccggccgtggtaccgttgttaccggtcgtgtagagcgcggtatcgttaaagtgggcgaagaagtagaaatcgttggtatcaaagatactgcgaaatctacctgtaccggcgttgaaatgttccgcaaactgctggacgaaggccgtgctggtgagaacgttggtgttctgctgcgtggtatcaaacgtgaagaaatcgaacgtggtcaggttctggctaagccaggctctatcaagccgcacaccaagttcgaatctgaagtgtacatcctgtccaaagacgaaggcggccgtcatactccgttcttcaaaggctaccgtccacagttctacttccgtacaactgacgtgaccggtaccatcgaactgccagaaggcgtagagatggtaatgccaggcgacaacatcaaaatggttgttaccctgatccacccaatcgcgatggacgacggtctgcgtttcg

SEQ ID NO: 19 - DNA, 827 bp, Cedecea lapagei ATCC 33432
cgctattctggttgttgctgcaactgacggccctatgcctcagacccgtgagcacatcctgctgggtcgccaggttggcgttccttacatcatcgtgttcctgaacaaatgtgacatggttgatgacgaagagctgctggagctggtagaaatggaagttcgtgaacttctgtctcagtacgacttcccaggcgatgataccccaatcatccgtggttctgctctgaaagcgctggaaggcgaagcagagtgggaagctaaaatcgttgagctggctggcttcctggattcctacatcccagaaccagtacgtgcaatcgacctgccgttcctgctgccaatcgaagacgtattctccatctccggccgtggtaccgttgtkaccggtcgtgtagagcgcggtatcgttaaagtgggcgaagaagtagaaatcgttggtatcaaagatactgcgaaatctacctgtactggcgttgaaatgttccgcaaactgctggacgaaggccgtgctggtgagaacgttggtgttctgctgcgtggtatcaaacgtgaagaaatcgaacgtggtcaggttctggctaagccaggctctatcaagccgcacaccaagttcgaatctgaagtgtacatcctgtccaaagacgaaggcggccgtcatactccgttcttcaarggctaccgtccacagttctacttccgtaccactgacgtgaccggtaccatcgaactgccagaaggcgtagagatggtaatgccaggtgacaacatcaaaatggttgttaccctgatccacccaatcgcgatggacgacggtctgcgtttcgcaa

SEQ ID NO: 20 - DNA, 831 bp, Chlamydia pneumoniae strain CWL 029
gcggagctatcctagtcgtttcagctacagacggagctatgccacaaactaaagaacatatcttgctagctcgccaggttggagttccttatatcgttgttttcttgaataaagtagatatgatctctcaagaagatgctgaacttattgaccttgttgagatggaacttagtgagcttcttgaagaaaaaggctacaaaggatgccctattatccgtggttctgctttgaaagctcttgaaggtgatgcaaattatatcgaaaaagttcgagaacttatgcaagctgtggatgacaacatccctacaccagaaagagaaattgataagcctttcttaatgcctatcgaagacgtattctcaatctctggtcgtggtactgtggttacaggaagaatcgagcgtggaatcgttaaagtttctgataaagttcagctcgtgggattaggagagactaaagaaacaatcgttactggagtcgaaatgttcaggaaagaacttcctgaaggtcgtgcaggagaaaacgttggtttactcctcagaggtattggaaagaacgatgttgaaagaggtatggtggtttgtcagcctaacagcgtgaagcctcatacgaaatttaagtcagctgtttacgttcttcagaaagaagaaggcggacgtcataagcctttcttcagcggatacagacctcagttcttcttccgtactacagacgtgacaggagtcgtaactcttcctgaaggaactgaaatggtaatgcctggagataacgttgagcttgatgttgagctcattggaacagttgctcttgaagaaggaatgagatttgcaa

SEQ ID NO: 21 - DNA, 826 bp, Chlamydia psittaci
tggagcgattctcgttgtttccgctactgacggtgcgatgcctcagaccaaagaacatattcttttggcgagacaggttggtgttccttacatcgttgttttccttaacaaaatcgatatgatttctcaagaagatgctgagctcgtagacttagttgaaatggaattgtccgaacttctagaagaaaaaggttataaaggttgcccaattatccgtggttctgctttgaaagccttagaaggtgatgcaagctacgttgaaaaaattcgcgagttaatgcaagcagtggatgataacatccctactccagagcgtgaagttgataagcctttcttaatgcctatcgaagacgtattctctatttctggtcgtggtactgtggtcacaggacgtatcgagcgtggaatcgttaaagtgggtgataaagtacagattgttggtttaagagatactagagagacaattgttaccggtgtggaaatgttcagaaaagaacttccagaaggtcaagcaggggaaaacgttggtttgctcctcagaggtatcggtaagaatgacgttgaacgtggtatggttatctgccaacctaatagcgtgaaatctcacacacaatttaaaggtgctgtctacattctacaaaaagaagagggtggacgtcataaacctttctttaccggatacagacctcagttcttcttccgtacaacagatgttacaggtgttgtaactctcccagaaggtacagagatggttatgccaggcgataacgttgaattcgaagttcaattaattagcccagtagctctagaagaaggtatgagattt

SEQ ID NO: 22 - DNA, 822 bp, Chlamydia trachomatis strain LGV 12
ggggctattctagtagtttctgcaacagacggagctatgcctcaaactaaagagcatattcttttggcaagacaagttggggttccttacatcgttgtttttctcaataaaattgacatgatttccgaagaagacgctgaattggtcgacttggttgagatggagttggctgagcttcttgaagagaaaggatacaaagggtgtccaatcatcagaggttctgctctgaaagctttggaaggggatgctgcatacatagagaaagttcgagagctaatgcaagccgtcgatgataatatccctactccagaaagagaaattgacaagcctttcttaatgcccattgaggacgtgttctctatctccggacgaggaactgtagtaactggacgtattgagcgtggaattgttaaagtttccgataaagttcagttggtcggtcttagagatactaaagaaacgattgttactggggttgaaatgttcagaaaagaactcccagaaggtcgtgcaggagagaatgttggattgctcctcagaggtattggtaagaacgatgtggaaagaggaatggttgtttgcttgccaaacagtgttaaacctcatacacggtttaagtgtgctgtttacgttctgcaaaaagaagaaggtggacgacataagcctttcttcacaggatatagacctcaattcttcttccgtacaacagacgttacaggtgtggtaactctgcctgagggagttgagatggtcatgcctggggataacgttgagtttgaagtgcagttgattagccctgtggctttagaagaaggtatgaga

SEQ ID NO: 23 - DNA, 835 bp, Chryseobacterium meningosepticum strain CDC B7681
cggagctatcttagtatgtgctgctacagatggtccaatgcctcaaactagagaacacatcctactttgccgtcaggtaaacgtacctagaattgttgtgttcatgaacaaagttgacatggtagatgatccagaattgttagagcttgttgagcttgaacttagagatctattatctacttacgaatatgatggtgataactctccagtaattcaaggttctgctcttggtgctcttaacggtgatgctaagtgggtagctactgtagaagctctaatggatgctgttgatacttggatcgagcaaccagtaagagattctgataagccattccttatgccaatcgaagacgtattctctattacaggtagaggtactgtagcaactggtagaatcgaggctggtgtaatcaacacaggtgatcctgttgacatcgtaggtatgggtgacgagaagttaacttctactattacaggtgttgagatgtttagaaaaatcctagacagaggtgaagctggtgataacgtaggtctattgttgagaggtattgaaaagactgacatcaagagaggtatggttatcgctaagaaagattcagttaagccacacaagaaattcaaagctgaggtttatatcctttctaaagaagaaggtggacgtcacactccattccacaacaaataccgtcctcagttctatgtaagaactactgacgttacaggtgaaatcttcttaccagaaggtgtagaaatggtaatgcctggtgataacttaactatcactgtagaattgttacaaccaatcgctcttaacgagggtcttagattcgcgatc

SEQ ID NO: 24 - DNA, 816 bp, Citrobacter amalonaticus ATCC 25405
cggcgcgatcctggttgttgctgcgactgacggcccgatgccgcagactcgtgagcacatcctgctgggtcgtcaggtaggcgttccgtacatcatcgtgttcctgaacaaatgcgacatggttgatgacgaagagctgctggaactggtagaaatggaagttcgtgaacttctgtctcagtacgatttcccgggcgacgacaccccgatcgttcgtggttctgctctgaaagcgctggaaggcgacgcagagtgggaagcgaaaatcatcgaactggccggcttcctggattcttacatcccggaaccagagcgtgcgattgacaagccgttcctgctgccgatcgaagacgtattctccatctccggtcgtggtaccgttgttaccggtcgtgtagaacgcggtatcatcaaagtgggcgaagaagttgaaatcgttggtatcaaagagactgccaagtctacctgtactggcgttgaaatgttccgcaaactgctggacgaaggccgtgcgggtgagaacgttggtgttctgctgcgtggtatcaaacgtgaagaaatcgaacgtggtcaggtactggctaagccgggcwccatcaagccgcacaccatgttcgaatcygaagtgtacatcctgtccaaagacgaaggcggccgtcatactccgttcttcaaaggctaccgtccgcagttctacttccgtacaactgacgtgactggcaccatcgaactgccggaaggcgttgagatggtaatgccgggcgacaacatcaaaatggttgttaccctgatccacccgatcgcgatggacgacgg

SEQ ID NO: 25 - DNA, 825 bp, Citrobacter braakii ATCC 43162
cgcgatcctggttgttgctgcaactgacggcccgatgccgcagactcgtgagcacatcctgctgggtcgycaggtaggcgttccgtacatcatcgtgttcctgaacaaatgcgacatggttgatgacgaagagctgctggaactggtagaaatggaagttcgtgaacttctgtctcagtacgatttcccgggcgacgacacgccgatcgttcgtggttctgctctgaaagcgctggaaggcgawgcagagtgggaagcgaaaatcatcgaactggctggcttcctggattcttacatcccggaaccagagcgtgcgattgacaagccgttcctgctgcctatcgaagacgtattctccatctctggtcgtggtaccgttgttaccggtcgtgtagagcgcggtatcatcaaagttggtgaagaagttgaaatcgttggtatcaargacactgctaagtctacctgtactggcgttgaaatgttccgcaaactgctggacgaaggccgtgctggtgagaacgttggtgttctgctgcgtggtatcaagcgtgaagaaatcgaacgtggtcaggtactggctaagccgggctctatcaagccgcacaccaagttcgaatctgaagtgtacattctgtccaaagacgaaggcggccgtcatactccgttcttcaarggctaccgtccgcagttctacttccgtactactgacgtgactggtaccatcgaactgccggaaggcgttgagatggtaatgccgggcgacaacatcaaaatggttgttaccctgatccacccaatcgcgatggacgacggtctgcgtttcgc

SEQ ID NO: 26 - DNA, 830 bp, Citrobacter koseri ATCC 27156
cggcgcgatcctggttgttgctgcgactgacggcccgatgccgcagacccgtgagcacatcctgctgggtcgtcaggtaggcgttccgtacatcatcgtgttcctgaacaaatgcgacatggttgatgacgaagagctgctggaactggttgagatggaagtgcgtgaactgctgtctcagtacgatttcccgggcgacgacacgccgatcgttcgtggttctgctctgaaagcgctggaaggcgamgctgagtgggaagcgaaaatcatcgaactggctggctacctggattcttacatcccggaaccagagcgtgcgattgacaagccgttcctgctgccgatcgaagacgtattctccatctccggtcgtggtaccgttgttaccggtcgtgtagagcgcggtatcatcaaagtgggcgaagaagttgaaatygttggtatcaaagagactgcgaagtctacctgtactggcgttgaaatgttccgcaaactgctggacgaaggccgtgctggtgagaacgtaggtgttctgctgcgtggtatcaaacgtgaagaaatcgaacgtggtcaggtactggctaagccgggytccatcaagccgcacaccaagttcgaatctgaagtgtacatyctgtcyaaagatgaaggcggccgtcatactccgttcttcaaaggctaccgtccgcagttctacttccgtacaactgacgtgactggcaccatcgaactgccggaaggcgtagagatggtaatgccgggcgacaacatcaaaatggttgttaccctgatccacccgatcgcgatggacgacggtctgcgtttcgcaa

SEQ ID NO: 27 - DNA, 827 bp, Citrobacter farmeri ATCC 51112
cgcgatcctggttgttgctgcgactgacggcccgatgccgcagactcgtgagcacatcctgctgggtcgtcaggtaggcgttccgtacatcatcgtgttcctgaacaaatgcgacatggttgatgacgaagagctgctggaactggtagagatggaagttcgtgaactgctgtctcagtacgatttcccgggcgacgacacgccgatcgttcgtggttctgctctgaaagcgctggaaggcgacgcagagtgggaagcgaaaatcatcgaactggcaggcttcctggattcttacatcccggaaccagagcgtgcgattgacaagccgttcctgctgccgatcgaagacgtattctccatctctggtcgtggtaccgttgttaccggtcgtgtagagcgcggtatcatcaaagtgggtgaagaagttgaaatcgttggtatcaaagagactgccaagtctacctgtactggcgttgaaatgttccgcaaactgctggacgaaggccgtgctggtgagaacgtaggtgttctgctgcgtggtatcaaacgtgaagaaatcgaacgtggtcaggtactggctaagccgggcwccatcaagccrcacactatgttcgaatctgaagtgtacattctgtccaaagacgaaggcggccgtcatactccgttcttcaaaggctaccgtccgcagttctacttccgtacgactgacgtgactggcaccatcgaactgccggaaggtgttgagatggttatgccgggcgacaacatcaaaatggttgttaccctgatccacccgatcgcgatggacgacggtctgcgtttcgcaa

SEQ ID NO: 28 - DNA, 797 bp, Citrobacter freundii ATCC 8090
cctggttgttgctgcgactgacggcccgatgccgcagactcgtgagcacatcctgctgggtcgtcaggtaggcgttccgtacatcatcgtgttcctgaacaaatgcgacatggttgatgacgaagagctgctggaactggtagaaatggaagttcgtgaacttctgtctcagtacgatttcccgggcgacgacactccgatcgttcgtggttctgctctgaaagcgctggaaggcgaagcagagtgggaagcgaaaatcatcgaactggctggcttcctggattcttacatcccagaaccagagcgtgcgattgacaagccgttcctgctgcctatcgaagacgtattctccatctccggtcgtggtaccgttgttaccggtcgtgtagagcgcggtatcatcaaagttggtgaagaagttgaaatcgttggtatcaaagagactgctaagtctacctgtactggcgttgaaatgttccgcaaactgctggacgaaggccgtgctggtgagaacgttggtgttctgctgcgtggtatcaaacgtgaagaaatcgaacgtggtcaggtactggctaagccgggctctatcaagccgcacaccaagttcgaatctgaagtgtacattctgtccaaagacgaaggcggccgtcatactccgttcttcaaaggctaccgtccgcagttctacttccgtactactgacgtgactggtaccatcgaactgccggaaggcgtagagatggtaatgccgggcgacaacatcaaaatggttgttaccctgatccacccaatcgcga

SEQ ID NO: 29 - DNA, 826 bp, Citrobacter sedlakii ATCC 51115
cggcgcgatcctggttgttgccgcgactgacggcccgatgccgcagacccgtgagcacatcctgctgggtcgtcaggtaggcgttccgtacatcatcgtgttcctgaacaaatgcgacatggttgatgacgaagagctgctggaactggtagagatggaagttcgtgaactgctgtctcagtacgatttcccgggcgacgacacgccgatcgttcgtggttcagctctgaaagcgctggaaggcgacgcagagtgggaagcgaaaatcatcgaactggctggcttcctggattcttacattccggaaccagagcgtgcgattgacaagccgttcctgctgccgatcgaagacgtattctccatctccggtcgtggtaccgttgttaccggtcgtgtagagcgcggtatcatcaaagtgggcgaagaagttgaaatcgttggtatcaaagagactgcgaagtctacctgtactggcgttgaaatgttccgcaaactgctggacgaaggccgtgcgggtgagaacgtaggtgttctgctgcgtggtatcaaacgtgaagaaatcgaacgtggtcaggtactggcgaagccgggcaccatcaagccgcacaccaagttcgaatctgaagtgtatattctgtccaaagatgaaggcggccgtcatactccgttcttcaaaggctaccgtccgcagttctacttccgtacaactgacgtgactggcaccatcgaactgccggaaggcgtagagatggtaatgccgggcgacaacatcaaaatggttgttaccctgatccacccgatcgcgatggacgacggtctgcgtttc

SEQ ID NO: 30 - DNA, 823 bp, Citrobacter werkmanii ATCC 51114
gcgatcctggttgttgctgcgactgacggcccgatgccgcagactcgtgagcacatcctgctgggtcgtcaggtaggcgttccgtacatcatcgtgttcctgaacaaatgcgacatggttgatgacgaagagctgctggaactggtagaaatggaagttcgtgaacttctgtctcagtacgatttcccgggcgacgacactccgatcgttcgtggttctgctctgaaagcgctggaaggcgaagcagagtgggaagcgaaaatcatcgaactggctggctttctggattcttacatcccggaaccagagcgtgcgattgacaagccgttcctgctrcctatcgaagacgtattctccatctccggtcgtggtaccgttgttaccggtcgtgtagagcgcggtatcatcaaagttggtgaagaagttgaaatcgttggtatcaaagacaccgctaagtctacctgtaccggcgttgaaatgttccgcaaactgctggacgaaggccgtgctggtgagaacgttggtgttctgctgcgtggtatcaaacgtgaagaaatcgaacgtggtcaggtactggctaagccgggctctatcaagccgcacaccaagttcgaatctgaagtgtacatcctgtccaaagacgaaggcggccgtcatactccgttcttcaaaggctaccgtccgcagttctacttccgtactactgacgtgactggtaccatcgaactgccggaaggcgtagagatggtaatgccgggcgacaacatyaaaatggttgttacyctgatccacccgatcgcgatggacgacggtctgcgtttcg

SEQ ID NO: 31 - DNA, 826 bp, Citrobacter youngae ATCC 29935
ggcgcgatcctggttgttgctgcgactgacggcccgatgccgcagactcgtgagcacatcctgctgggtcgtcaggtaggcgttccgtacatcatcgtgttcctgaacaaatgcgacatggttgatgacgaagagctgctggaactggtagaaatggaagttcgtgaacttctgtctcagtacgatttcccgggcgacgatacgccgatcgttcgtggttctgctctgaaagcgctggaaggcgaagcagagtgggaagcgaaaatcatcgaactggctggcttcctggattcttacatcccggaaccagaacgtgctatcgataagccgttcctgctgccaatcgaagacgtattctccatctccggtcgtggtaccgttgttactggtcgtgtagaacgcggtatcatcaaagttggtgaagaagttgaaatcgttggtatcaaagagactgccaagtctacctgtactggcgttgaaatgttccgcaaactgctggacgaaggccgtgctggtgagaacgttggtgttctgctgcgtggtatcaaacgtgaagaaatcgaacgtggtcaggtactggctaagccgggctctatcaagccgcacaccaagttcgaatctgaagtgtacattctgtccaaagacgaaggcggccgtcatactccgttcttcaaaggctaccgtccgcagttctacttccgtactactgacgtgacgggtaccatcgaactgccggaaggcgtagagatggtaatgccgggcgacaacatcaaaatggttgttaccctgatccacccaatcgcgatggatgacggtctgcgtttcg

SEQ ID NO: 32 - DNA, 841 bp, Clostridium perfringens ATCC 13124
cggagctatattagtttgttcagcagctgatggtccaatgcctcaaacaagagagcacatcttattatcatcaagagttggagttgaccacatcgtagtattcttaaacaaagcagatatggttgacgacgaagaattattagaattagttgaaatggaagttagagagttattaagcgagtacaacttcccaggagacgayattccagtaatcaarggatcagctttagtagcattagaaaacccaactgacgaagctgcaacagcttgtatcagagagttaatggatgctgtagatagctacatcccaacaccagaaagagcaacagataagccattcttaatgccagtagaggacgtattcacaatcactggtagaggaacagttgcaacaggaagagttgaaagaggagttctacatgtaggagacgaagtagaagtaatcggattaactgaagaaagaagaaaaactgttgtaacaggaatcgaaatgttcagaaagttattagatgaagcacaagctggagataacatcggagcattattaagaggtatccaaagaactgayatcgaaagaggtcaagttttagctcaagttggaacaatcaacccacacaaaaaattcgtaggtcaagtatacgtacttaaaaaagaagaaggtggaagacatactccattcttcgatggatacagaccacaattctacttcagaacaacagacgttacaggatcaatcaaattaccagaaggaatggaaatggttatgcctggagaccacatcgacatggaagttgaattaatcacagaaatcgctatggaygaaggattaagattcgctatc

SEQ ID NO: 33 - DNA, 822 bp, Comamonas acidovorans ATCC 15668
cggcgccatcctggtgtgctcggccgctgacggccccatgccccagacccgcgagcacatcctgctggcccgtcaggtgggcgtgccctacatcatcgtgttcctgaacaagtgcgacatggtggacgacgaagagctgctggaactggtcgaaatggaagtgcgcgagctgcttgccaagtacgacttccccggcgacgacacccccatcatccgcggctcggccaagctggccctggaaggcgaccagtccgacaagggcgaacctgccatcctgcgcctggctgaagcactggactcctacatccccacgcccgagcgcgctgtggacggcgcctttgcaatgcccgtggaagacgtgttctcgatctctggccgtggcaccgtggtgactggccgtatcgagcgcggcatcatcaaggtcggcgaagaaatcgaaatcgtcggtatccgcgacacccagaagaccatcgtcaccggcgtggaaatgttccgcaagctgctggaccaaggtcaagctggcgacaacgtgggtctgctgctgcgcggcaccaagcgtgaagacgtggaacgcggccaagtgctgtgcaagcccggctccatcaagccccacacccacttcacggctgaggtgtacgtgctgtccaaggacgaaggtggtcgccacactccgttcttcaacaactaccgtccccagttctatttccgtacgaccgacgtgaccggctccatcgagctgcccgccgacaaggaaatggtgatgcctggcgacaacgtgtcgatcaccgtcaagctgatcgcccccatcgccatggaagaagg

SEQ ID NO: 34 - DNA, 702 bp, Corynebacterium bovis ATCC 7715
gccgcagacccgtgagcacgtcctcctggcccgtcaggtcggtgtgccctacatcctcgtcgccctcaacaagtgcgacatggtcgacgacgaggacctcatcgagctcgtcgagatggaggtccgtgagctcctcgccgagcaggactacgacgaggacgccccgatcatccacatctccgccctcaaggccctcgagggtgacccggagtggacgcagcgcatcgtcgacctcatgaaggcctgcgacgacgccatcccggatccggagcgcgagacggacaagccgttcctcatgccgatcgaggacatcttcacgatcaccggccgcggcaccgtcgtcacgggccgtgtcgagcgtggcatcctcaacgtcaacgaggaggtcgagatcctgggtatctgcgagaactcccagaagacgaccgtcacctccatcgagatgttcaacaagttcctcgacacggccgaggccggcgacaacgccgccctgctgctccgtggcctgaagcgcgaggacgtcgagcgtggccagatcgtggccaagccgggcgcctacacgccgcacaccgagttcgagggctccgtgtacatcctctccaaggacgagggtggccgccacacgccgttcttcgacaactaccgtccgcagttctacttccggacgaccgacgtcaccggcgtcgtcaagctgccggaggg

SEQ ID NO: 35 - DNA, 689 bp, Corynebacterium cervicis NCTC 10604
ggctcagacccgcgagcacgttctgcttgctcgccaggttggcgttccgacgatcctggttgccctcaacaaggccgatatggtcgacgatgaggaaatgctggagctcgttgaggaagagtgccgcgacctgctcgagtcccaggacttcgatcgtgacgccccgatcatccaggtttccgcgctgaaggctctcgaaggtgatccgcagtgggttgctaaggtcgaggagctcatggaggcagtcgacaccttcgtgccgactcctgagcgcgacatggacaagccgttcctcatgccgatcgaagacgtcttcaccatcaccggccgtggcaccgttgttaccggtcgtgttgagcgtggcaagctcccgatcaactctgaggttgaaatcctcggtatccgcgaaccgcagaagaccaccgttaccggtatcgagatgttccacaagtccatggatgaagcatgggcaggcgagaactgtggtctcctcctgcgtggcaccaagcgcgatgaggttgagcgcggtcaggtcgttgccgttcccggttcgatcaccccgcacaccaacttcaccggacaggtctacatcctcaagaaggaagaaggcggtcgtcacaacccgttcttctcgaactaccgtccgcagttctacttccgcaccacggacgtgaccggcgtcatcaccc

SEQ ID NO: 36 - DNA, 804 bp, Corynebacterium flavescens ATCC 10340
ggttgttgctgcaaccgatggtcctatgccgcagacccgcgagcacgttcttctggctcgccaggttggcgttccttacatcctcgttgctcttaacaagtgcgacatggttgatgatgaggaaatcatcgagctcgttgagatggaaatccgcgaactgctcgctgagcaggactacgacgaggatgcccccatcatccacatctccgctctcaaggctcttgagggtgacgagaagtgggtacaggccatcgtcgacctcatgcaggcctgcgatgactccattccggatccggagcgcgagaccgacaagcccttcctcatgcctatcgaggacatcttcaccatcaccggccgcggtaccgttgttaccggccgtgttgagcgtggcgttttgaaggtcaacgaggatgttgagatcatcggcatcaaggagaagtccatctccaccaccgttaccggtatcgaaatgttccgcaagatgatggactacaccgaggctggcgacaactgtggtctgcttctgcgtggtaccaagcgtgaagaggtcgagcgcggccaggttgttatcaagccgggcgcctacaccccccacaccaagttcgagggttccgtctacgtcctcaagaaggaagagggcggccgccacaccccgttcatggacaactaccgtccgcagttctacttccgtaccactgacgtgaccggcgttgttcacctgcctgagggcaccgagatggtcatgcctggcgacaacgttgatatgaccgttgagctcatccagcccgtcgctaggatgagggc

SEQ ID NO: 37 - DNA, 692 bp, Corynebacterium kutscheri ATCC 15677
tgcctcagacccgtgagcacgttcttcttgctcgccaggttggcgttccttacatcctcgttgctcttaacaagtgcgacatggttgacgatgaggaaatcatcgagctcgttgagatggaagttcgcgagcttcttgctgagcaggagtacgatgaagaggctccaatcatccacatctctgctttgaaggctcttgagggcgacgagaagtggactcaggccatcatcgacctcatgcaggcttgtgatgactccatcccagatccagagcgtgagaccgacaagccattcctcatgcctatcgaggatatcttcaccatcaccggtcgtggcaccgttgttaccggtcgtgttgagcgcggttccttgaaggtgaatgaggacgtcgagatcatcggcatcaaggagaagtccaccactactaccgttaccggtatcgaaatgttccgtaagcttcttgattacaccgaagctggcgataactgtggtctgcttcttcgtggtatcaagcgcgaagacgttgagcgtggtcaggttgttgttaagccaggcgcttacacacctcacaccgagttcgagggctctgtttacgttctttccaaggacgagggcggccgccacaccccattcttcgacaactaccgtccacagttctacttccgcaccactgacgttaccggtgttgtgaag

SEQ ID NO: 38 - DNA, 797 bp, Corynebacterium minutissimum ATCC 23348
cctggttgttgctgcaaccgatggcccgatgccgcagacccgcgagcacgttcttctggcccgccaggttggcgttccgtacatcctcgttgcactgaacaagtgtgacatggttgacgatgaggaaatcatcgagctcgttgagatggagatccgtgagctgctcgctgagcaggactacgacgaggaagctccgatcgttcacatctccgctctgaaggctcttgagggcgacgagaagtgggcacagtccatcgttgacctgatgcaggcttgcgatgactccatcccggatccggagcgcgagctggacaagccgttcctgatgccgatcgaggacatcttcaccattaccggccgcggtaccgttgttaccggccgtgttgagcgtggctccctgaacgttaacgaggacatcgagatcatcggtatcaaggacaagtccatgtccaccaccgttaccggtatcgagatgttccgcaagatgatggactacaccgaggctggcgacaactgtggtctgcttctgcgtggtaccaagcgtgaagaggttgagcgtggccaggtttgcatcaagccgggcgcttacaccccgcacaccaagttcgagggttccgtctacgtcctgaagaaggaagagggcggccgccacaccccgttcatggacaactaccgtccgcagttctacttccgcaccaccgacgtcaccggtgtcatcaagctgccggagggcaccgagatggtcatgccgggcgacaacgttgagatgtccgtagagctgatccagccggtcgcta

SEQ ID NO: 39 - DNA, 702 bp, Corynebacterium mycetoides ATCC 21134
gccgcagacccgcgagcacgttcttctggcccgccaggtcggcgtcccctacatcctcgttgcgctgaacaagtgcgacatggttgatgatgaggagatcatcgagctcgtggagatggaggtccgtgagctgctcggcgagcaggactacgacgaggacgcccccatcatccacatctccgctctgaaggctctcgagggcgacgagaagtgggttcagtccgtgctcgacctcatgcaggcgtgcgacgactccatcccggatccggtccgcgagaccgaccgcgacttcctgatgccgatcgaggacatcttcaccatctccggccgcggcaccgtggttaccggtcgtgtggagcgcggcgtgctcaacctcaacgacgaggtcgagatcatcggcatccgcgacaagtcccagaagaccaccgtcacctccatcgagatgttcaacaagctgctcgataccgctgaggcaggcgacaacgcggctctgctgctccgcggtctgaagcgcgaggacgtcgagcgtggccaggttgtcatcaagccgggcgcctacaccccgcacaccaagttcgagggttccgtctacgtcctgtccaaggacgagggcggccgccacaccccgttcttcgacaactaccgtccgcagttctacttccgcaccaccgacgtgaccggtgttgtgaagctgccggaggg

SEQ ID NO: 40 - DNA, 674 bp, Corynebacterium pseudogenitalium ATCC 33038
gctcgccaggttggcgttccttacatcctcgttgcgctgaacaagtgcgacatggttgatgatgaggaaatcatcgagctcgttgagatggagatccgtgagctgctcgcagagcaggattacgatgaggaagctcctatcgttcacatctccgctctgaaggccctcgagggcgatgacaagtgggtacagtccgtcgttgatctgatggaagcctgcgacaactccatcccggatccggagcgcgctaccgaccagccgttcctgatgcctatcgaggacatcttcaccattaccggccgcggtaccgttgttaccggccgtgttgagcgtggccgtctgaacgtcaacgaggacgttgagatcatcggtatccaggagaagtcccagaccaccaccgttaccggtatcgagatgttccgcaagatgatggactacaccgaggctggcgacaactgtggtctgcttctgcgtggtaccaagcgtgaggacgttgagcgtggccaggttgttatcaagccgggcgcttacaccccgcacaccaagttcgagggctccgtctacgtcctgaagaaggaagagggcggccgccacaccccgttcatgaacaactaccgtccgcagttctacttccgtaccacggacgttaccggtgttgttcacctgccagaggg

SEQ ID NO: 41 - DNA, 694 bp, Corynebacterium renale ATCC 19412
tgcctcagacccgtgagcacgttctgcttgctcgtcaggtcggcgttccttacatcctcgttgcactgaacaagtgcgacatggtcgacgacgaagaaatcatcgagctcgtcgagatggaaatccgtgaactgctcgcagagcaggactacgatgaggaagctcctatcgttcacatctccgctctgggcgccctgaacggcgagcagaagtgggttgactccatcgtcgaactgatggaagcttgcgacaactccatcccagacccagttcgcgacatcgaccacccattcctgatgcctatcgaggacatcttcaccattaccggtcgcggtaccgttgttaccggccgtgtcgagcgtggccgtctcaacgtcaacgaagaagttgagatcatcggtatcaaggacaagtcccagaagaccaccgtcaccggtatcgagatgttccgcaagatgctggactacaccgaagctggcgacaactgtggtctgctgctccgcggcatcggccgtgaggatgtcgagcgtggccaggttatcatcaagccaggcgcttacacccctcactctgagttcgagggctctgtctacgtcctgtccaaggacgagggtggccgccacaccccattcttcgacaactaccgtccacagttctacttccgcaccaccgacgtgaccggcgttgtgcacct

SEQ ID NO: 42 - DNA, 687 bp, Corynebacterium ulcerans NCTC 8665
gccgcagacccgcgagcacgttctgctggctcgccaggttggcgttccktacatcctsgttgcactgaacaagtgcgacatggttgacgatgaggarctcctsgagctcgtcgagatggaggtccgcgagctgctggctgagcaggactacgacgaggaagctccgrtcgttcacatctccgcwctgaacgccctggacggcgacsagaagtgggctvactccatcctcgagctgatgcaggcttgcgacgagtccatcccggatccggagcgcgagaccgacaagccgttcctgatgccgattgaggacatcttcaccattaccggtcgcggyaccgttgttaccggccgtgttgagcgtggcdtcctgaacgtsaacgacgasgttgagatcatgggyatccgggagaagtcccagaagaccaccgtyacckscatcgagatgttcaacaagmtgmtggacwccgcagaggctggcgacaacgctgswctgctgctgcgtggtmtsaagcgtgaggacgttgagcgtggccagatcatcgytaagccgggcgcktacaccccgcacaccgagttcgagggctccgtctacgtcctgtccaaggacgagggcggccgccacaccccgttcttcgacaactaccgtccgcagttctacttccgcaccaccgacgtsaccggtgttgt

SEQ ID NO: 43 - DNA, 778 bp, Corynebacterium urealyticum ATCC 43042
ctggttgttgctgcaaccgatggcccgatgccgcagacccgtgagcacgttctgctggctcgccaggttggcgttccgtacatcctcgttgcactgaacaagtgcgacatggttgacgatgaggagctcctcgagctcgtcgagatggaggtccgcgagcttctggctgagcaggactacgacgaggaggctccggtcgtcccgatctccgcactgggcgccctggacggcgatcagaagtgggtcgactccatcctcgagctcatgaaggcttgcgacgagtccatcccggacccggagcgcgagaccgacaagccgttcctgatgccggttgaggacatcttcaccattaccggtcgcggcaccgtcgttaccggccgtgttgagcgtggcgtcctgaacctgaacgacgaggtcgagatcctgggcatccgcgagaagtccaccaagaccaccgtcacctccatcgagatgttcaacaagctgctggacaccgcagaggctggcgacaacgctgcactgctgctgcgtggtctgaagcgtgaggacgtcgagcgaggccagatcatcgctaagccgggcgcttacaccccgcacaccgagttcgagggctccgtctacgtcctgtccaaggacgagggcggccgtcacaccccgttcttcgacaactaccgtccgcagttctacttccgtaccaccgacgtcaccggtgtcgttaccctgccagagggcaccgacatggtcatgccgggcgacaacgttgagatgagcgtcaagc

SEQ ID NO: 44 - DNA, 703 bp, Corynebacterium xerosis ATCC 373
cgcagacccgtgagcacgtcctcctggcccgccaggtcggcgtcccctacatcctcgtcgccctgaacaagtgcgacatggtcgacgatgaggagatcatcgagctcgtggagatggaggtgcgtgagcttctcgccgagcaggactacgacgaggaggccccgatcgtgcacatctccgccctgggcgccctcaatggcgaagagaagtgggtcgactccatcgtcgagctcatgaacgccgtcgacgagaacgttccggacccggtccgcgagaccgacaagccgttcctgatgcccgtcgaggacatcttcaccatcaccggccgcggcaccgtcgccaccggtcgcgtggagcgcggcaccctgaaggtcaacgacgaggtcgagatcctgggcatccaggagaagtcccagaccaccaccgtcaccggcatcgagatgttccgcaagctgctggactccgccgaggccggcgacaactgtggcctgctgctccgcggcatcaagcgcgaggacatcgagcgcggccagatcatcgcgaagccgggcgcctacaccccgcacaccgagttcgagggctccgtctacatcctggccaaggacgagggcggccgccacaccccgttcttcgacaactaccgtccgcagttctacttccgcaccaccgacgtcaccggcgtcgtgaagctgccggagggcac

SEQ ID NO: 45 - DNA, 832 bp, Coxiella burnetii strain Nine Mile phase II
ggagcgatattggtggtgagcgcagcggacggcccgatgccgcaaacgcgggaacacattgtattggcgaagcaagtgggtgttccgaacatagtggtttacttgaacaaagcggacatggtggatgacaaagagctgttggaattagtggaaatggaagtgagggatttattgaacagttatgatttccctggggatgagacgccgataatagtggggtcagcgttaaaggcgttagaaggtgacaagagtgaggttggggagccatcgataatcaaattagtggaaacgatggacacgtacttcccgcagccggagcgagcgatagacaaaccgtttttaatgccgatcgaagatgtgttttcgatatcgggccgagggacggtggtgacgggacgcgtagagcgagggatcatcaaagtgggcgacgagatagagattgtggggatcaaggacacgacgaagacgacgtgcacgggcgttgagatgtttcgcaaattattggatgaaggtcaagcgggtgacaacgtaggaattttattgagagggacgaaacgcgaagaagtggagcgtggtcaagtattggcgaaaccgggatcgatcacgccacacaagaaatttgaggcggagatttatgtgttgtcgaaggaagaagggggacgccacacaccgtttttacaaggctatcgaccgcaattttatttccgcacgacggacgtgacgggccagttattgagtttaccggaggggatagagatggtgatgccgggagataacgtgaaagtgacggttgaattgattgcgccggtagcgatggatgaagggctacgat

SEQ ID NO: 46 - DNA, 816 bp, Edwardsiella hoshinae ATCC 33379
ggcgctatcctggttgttgctgcgactgacggcccgatgccgcagacccgtgagcacatcctgctgggtcgccaggtaggcgttccgtacatcatcgtgttcctgaacaagtgcgacatggttgatgacgaagagctgctggaactggttgagatggaagttcgcgaactgctgtctcagtacgatttcccgggcgacgatacgccggtaatccgcggttctgcgctgaaagcgctggaaggcgaagccgagtgggaagcgaagatcatcgaactggctgaaacgctggactcctacattccggaacctgagcgtgacatcgacaagccgttcctgctgccgatcgaagacgtattctcaatctctggtcgtggtaccgttgttaccggtcgtgtagagcgcggtatcatcaaggtaggcgacgaagttgaaatcgtaggtatcaagccgaccaccaagactacctgtactggcgttgaaatgttccgcaaactgctggacgaaggccgtgctggtgagaacgtaggtgttctgctgcgtggtaccaagcgtgacgaaatcgaacgtggtcaggtactggctaagccgggcaccatcactccgcacaccaagttcgaatcagaagtgtacatcctgagcaaggatgaaggcggccgtcatactccgttcttcaaaggttaccgtccgcagttctacttccgtaccactgacgtgactggcaccatcgaactgccggaaggcgtagagatggtaatgccgggcgacaacatcaagatggttgttaccctgatccacccgatcgccatggacgatggt

SEQ ID NO: 47 - DNA, 821 bp, Edwardsiella tarda ATCC 15947
ggcgcgatcctggttgttgctgcgactgacggcccgatgccgcagacccgtgagcacatcctgttgggtcgccaggtaggcgttccgtacatcatcgtgttcctgaacaagtgcgacatggttgatgacgaagagctgctggaactggttgagatggaagttcgcgaactgctgtctcagtacgacttcccgggcgacgacacgccggtaatccgcggttctgcgctgaaagcgctggaaggcgaagccgagtgggaagcgaagatcatcgaactggctgaaactctggactcctacatcccggaacctgagcgtgacatcgacaagccgttcctgctgccgatcgaagacgtattctctatctctggccgtggtaccgttgttaccggtcgtgtagagcgcggtatcatcaaggtaggcgacgaagttgaaatcgttggtatcaagccgaccaccaagaccacctgtactggcgttgaaatgttccgcaaactgctggacgaaggccgtgctggtgagaacgttggtgttctgctgcgtggtactaagcgtgacgaaatcgaacgtggtcaggtactggctaagccgggcaccatcactccgcacaccaagttcgaatctgaagtgtacatcctgagcaaggatgaaggcggccgtcatactccgttcttcaaaggctaccgtccgcagttctacttccgtactactgacgtgactggtaccatcgaactgccggaaggcgtagagatggtaatgccgggcgacaacatcaagatggttgttaccctgatccacccgatcgccatggacgatggtctgcg

SEQ ID NO: 48 - DNA, 830 bp, Eikenella corrodens ATCC 23834
cggtgccatcctggtggtatccgctgctgacggccccatgcctcagactcgcgaacacatcctgttggctcgtcaggtaggtgtaccctacatcctcgtattcatgaacaaatgcgacatggtagatgatgccgagctgcttgagttggttgagatggaaatccgcgacctgctctccagctatgacttccctggtgacgactgcccgatcgtacaaggttccgctctcaaagccctcgaaggcgatgccggttacaaagaaaaaatcttcgaactagctgctgctttggatagctacatccccactcctcaacgtgctgtagacaaacccttcctgttgccgatcgaagacgtattctctatctccggccgtggtaccgtagtaaccggtcgtgtagagcgcggcatcatcaaagtaggtgaagagatcgaaatcgttggtctgaagcccactcagaaaactacctgtactggcgtggaaatgttccgcaaactgctggacgaaggtcaggccggtgacaacgtaggcgtactgctgcgcggtaccaaacgtgaagaagttgagcgtggtcaagtattggctaaacccggcaccatcactccgcacaccaagttcaaagccgaagtatacgtattgagcaaagaagaaggtggtcgtcacaccccgttctttgccaactaccgtccacagttctacttccgtactactgacgtaaccggtgctgtagagctggagcctggtgtagaaatggttatgcctggtgagaacgtaaccatcaccgtagaactgattgctccgattgctatggaagaaggtctgcgctttgcga

SEQ ID NO: 49 - DNA, 808 bp, Enterobacter aerogenes ATCC 13048
ggcgcgatcctggttgttgctgcgactgacggcccgatgccgcagactcgtgagcacatcctgctgggtcgtcaggtaggcgttccgtacatcatcgtgttcctgaacaaatgcgacatggttgatgacgaagagctgctggaactggttgagatggaagttcgtgaactgctgtctcagtacgatttcccgggcgacgacactccgatcgttcgtggttctgctctgaaagcgctggaaggcgacgcagagtgggaagcgaaaatcatcgaactggctggcttcctggattcttacatcccrgaaccagagcgtgcgattgacaagccgttcctgctgccgatcgaagacgtattctccatctccggtcgtggtaccgttgttaccggtcgtgtagagcgcggtatcatcaaagttggtgaagaagttgaaatcgttggtatcaaagacaccgcgaaaaccacctgtactggcgttgaaatgttccgcaaactgctggacgaaggccgtgctggtgagaacgtaggygttctgctgcgtggtatcaaacgtgaagaaatcgaacgtggtcaggtactggctaagccgggcagcatcaagccgcacaccaagttcgaatctgaagtgtacatcctgtccaaagacgaaggcggccgtcatactccgttcttcaaaggctaccgtccgcagttctacttccgtactactgacgtgactggtaccatcgaactgccggaaggcgtagagrtggtaatgccgggcgacaacatcaaaatggttgttaccctgatccacccgatcgcgatgg

SEQ ID NO: 50 - DNA, 828 bp, Enterobacter agglomerans ATCC 27989
cggcgcgatcctggttgttgctgcgactgacggcccgatgccgcagactcgtgagcacatcctgctgggtcgtcaggtaggcgttccgtacatcatcgtgttcctgaacaaatgtgacatggttgatgacgaagagctgctggaactggttgaaatggaagttcgtgaacttctgtctcagtacgatttcccgggcgacgatactccgatcgttcgtggttctgctctgaaagcgctggaaggcgamgcwgagtgggaagcgaaaatcatcgarctggctggccacctggatacctatatcccggaaccagagcgtgcgattgacaagccgttcctgctgccgatcgaagacgtattctccatctccggtcgcggtaccgttgttaccggtcgtgtagagcgcggtatcatyaaagtgggcgaagaagttgaaatcgttggtatcaaagatacygcgaaatcaacctgtaccggcgttgaaatgttccgcaaactgctggacgaaggccgtgctggtgagaacgttggtgttctgctgcgtggtatcaaacgtgaagaaatcgaacgtggtcaggtactggctaagccgggcaccatcaagccgcacaccaagttcgaatctgaagtgtacattctgtccaaagatgaaggcggtcgtcacactccgttcttcaaaggctaccgtccscagttctacttccgtacaactgacgtgactggcaccatcgaactgccggaaggcgtagagatggtaatgccgggcgacaacatcaaaatggttgttaccctgatccacccgatcgcgatggacgacggtctgcgttcgca

SEQ ID NO: 51 - DNA, 825 bp, Enterobacter amnigenus ATCC 33072
tggcgcgatcctggttgttgctgcaactgatggccctatgccacagacgcgtgagcacatcctgctgggtcgtcaggtaggcgttccttacatcatcgtgttcctgaacaaatgcgacatggttgatgacgaagagctgctggaactggtagaaatggaagttcgtgaacttctgtctcagtacgatttcccaggtgatgacactccaatcatccgtggttctgctctgaaagcgctggaaggcgaagcagagtgggaagctaaaatcgttgagctggctggctacctggattcttacatcccggaaccagaacgtgctatcgataagccattcctgctgccaatcgaagacgtattctctatctccggccgtggtactgttgtaaccggtcgtgtagagcgcggtatcgttaaagttggcgaagaagttgaaatcgttggtatcaaagagactgctaagtctacctgtactggcgttgaaatgttccgcaaactgctggacgaaggccgtgctggtgagaacgttggtgttctgctgcgtggtatcaaacgtgaagaaatcgaacgtggtcaggtactggctaagccaggctcaatcaagccgcacaccaaattcgaatctgaagtttatattctgtccaaagatgaaggcggccgtcatactccgttcttcaaaggctaccgtccacagttctacttccgtacaactgacgtgaccggcaccatcgaactgccagaaggcgtagagatggtaatgccaggcgacaacattcagatggttgttaccctgatccacccaatcgcgatggatgacggtctgcgttt

SEQ ID NO: 52 - DNA, 822 bp, Enterobacter asburiae ATCC 35953
cggcgcgatcctggttgttgctgcgactgacggcccaatgcctcagactcgtgagcacatcctgctgggtcgtcaggtaggcgttcctttcatcatcgtgttcctgaacaaatgcgacatggttgatgacgaagagctgctggaactggtagagatggaagttcgtgaactgctgtctcagtacgatttcccgggcgacgatactccaatcgttcgtggttctgctctgaaagcgctggaaggcgacgcagagtgggaagcgaaaatcatcgaactggctggcttcctggattcttacatcccagaaccagagcgtgcgattgacaagccattcctgctgccaatcgaagacgtattctccatctccggtcgtggtaccgttgttaccggtcgtgtagagcgcggtatcatcaaagttggcgaagaagttgaaatcgttggtatcaaagagactgctaagtctacctgtactggcgttgaaatgttccgcaaactgctggacgaaggccgtgctggtgagaacgttggtgttctgctgcgtggtatcaaacgtgaagaaatcgaacgtggtcaggttctggcgaagccaggctcaatcaagccacacaccaagttcgaatctgaagtgtacatcctgtccaaagacgaaggcggccgtcatactccgttcttcaaaggctaccgtccacagttctacttccgtacaactgacgtgaccggtaccatcgaactgccagaaggcgttgagatggtaatgccaggcgacaacatcaagatggttgtgactctgatccacccaatcgcgatggacgacggtctgcg

SEQ ID NO: 53 - DNA, 826 bp, Enterobacter cancerogenus ATCC 35317
cggcgcgatcctggttgttgctgcgactgacggcccaatgcctcagactcgtgagcacatcctgctgggtcgtcaggtaggcgttccttacatcatcgtgttcctgaacaagtgcgacatggttgatgacgaagagctgctggaactggtagaaatggaagttcgtgaactgctgtctcagtacgatttcccaggcgacgacactccaatcgttcgtggttccgcgctgaaagcgctggaaggcgaagctgagtgggaagcaaaaatcatcgaactggctggcttcctggattcttacatcccagaaccagagcgtgcgattgacaagccattcctgctgccaatcgaagacgtattctccatctccggtcgtggtaccgttgttaccggtcgtgtagagcgcggtatcatcaaagttggtgaagaagttgaaatcgttggtatcaaagatactgckaaatctacctgtactggcgttgaaatgttccgcaaactgctggacgaaggccgtgctggtgagaacgttggtgttctgctgcgtggtatcaaacgcgaagaaatcgaacgtggtcaggttctggcgaagccaggctcaatcaagccacacaccaagttcgaatctgaagtgtacatcctgtccaaagacgaaggcggccgtcatactccgttcttcaaaggctaccgtccacagttctacttccgtacaactgacgtgaccggtaccatcgaactgccagaaggcgtagagatggtaatgccaggcgacaacatcaagatggttgtgacgctgatccacccaatcgcgatggacgacggtctgcgtttc

SEQ ID NO: 54 - DNA, 806 bp, Enterobacter cloacae ATCC 13047
gatcctggtagtagctgcgactgacggcccaatgcctcagactcgtgagcacatcctgctgggtcgtcaggtaggcgttccttacatcatcgtgttcctgaacaaatgcgacatggttgatgacgaagagctgctggaactggtagagatggaagttcgtgaactgctgtctcagtacgatttcccaggcgacgataccccaatcgttcgtggttctgctctgaaagcgctggaaggcgacgcagagtgggaagmgaaaatcatcgaactggctggctacctggattcttacatcccagaaccagagcgtgcgattgayaagccattcctgctgccaatcgaagacgtattctccatctccggtcgtggtaccgttgttaccggtcgtgtagagcgcggtatcatcaaagtgggtgaagaagttgaaatcgttggtatcaaagagactgcgaagtctacctgtactggcgttgaaatgttccgcaaactgctggacgaaggccgtgctggtgagaacgttggtgttctgctgcgtggtatcaaacgtgaagaaatcgaacgtggtcaggttctggcgaagccaggctcaatcaagccacacaccaagttcgaatctgaagtgtacatcctgtccaaagacgaaggcggccgtcatactccgttcttcaaaggctaccgtccacagttctacttccgtacaactgacgtgaccggtaccatcgaactgccagaaggcgtagaggtggtaatgccaggcgacaacatcaagatggttgtgactctgatccacccaatcgcgatggacg

SEQ ID NO: 55 - DNA, 826 bp, Enterobacter gergoviae ATCC 33028
cggcgcgatcctggttgttgctgcgactgacggcccgatgccgcagacccgtgagcacatcctgctgggtcgtcaggtaggcgttccgtacatcatcgtgttcctgaacaagtgcgacatggttgatgacgaagagctgctggaactggtagagatggaagttcgtgaactgctgtctcagtacgatttcccgggcgacgacaccccgatcgttcgcggttctgcgctgaaagcgctggaaggcgacgcagagtgggaagcgaaaatcatcgaactggctggccacctggatacctayatcccggaaccagagcgtgcgattgacaagccgttcctgctgccgatcgaagacgtattctccatttccggtcgtggtaccgttgttaccggtcgtgtagagcgcggtatcatcaaggttggtgaagaagttgaaatcgttggtatcaaagacaccgcgaaaaccacctgtactggcgttgaaatgttccgcaaactgctggacgaaggccgtgctggtgagaacgtcggcgttctgctgcgtggtatcaagcgtgaagaaatcgaacgtggtcaggtactggctaagccgggctccatcaagccgcacaccaagttcgaatctgaagtgtacatcctgtccaaagacgaaggcggccgtcacactccgttcttcaaaggctaccgtccgcagttctacttccgtacaactgacgtgactggcaccatcgaactgccggaaggcgtagagatggtaatgccgggcgacaacatcaagatggttgttaccctgatccacccgatcgcgatggacgacggtctgcgtttc

SEQ ID NO: 56 - DNA, 829 bp, Enterobacter hormaechei ATCC 49162
ggcgcgatcctggttgttgctgcgactgacggccctatgcctcagacccgtgagcacatcctgctgggtcgtcaggtaggcgttccttacatcatcgtgttcctgaacaaatgcgacatggttgatgacgaagagctgctggaactggtagagatggaagttcgtgaactgctgtctcagtacgatttcccaggcgacgacaccccaatcgttcgtggttccgcgctgaaagcgctggaaggcgamgcagagtgggaagmgaaaatcatcgarctggctggcttcctggattcttacatcccagaaccagagcgtgcgattgacaagccattcctgctgccaatcgaagacgtattctccatctccggtcgtggtaccgttgttaccggtcgtgtwgagcgcggtatcatcaaagtaggtgaagaagttgaaatcgttggtatcaaagagactgcgaagtctacctgtactggcgttgaaatgttccgcaaactgctggacgaaggccgtgctggtgagaacgttggtgttctgctgcgtggtatcaaacgtgaagaaatcgaacgtggtcaggttctggcgaagccaggctcaatcaagccacacaccaagttcgaatctgaagtgtacattctgtccaaagacgaaggcggccgtcatactccgttcttcaaaggctaccgtccacagttctacttccgtacaactgacgtgaccggtaccatcgaactgccagaaggcgtagagatggtaatgccaggcgacaacatcaagatggttgtgacgctgatccacccaatcgcgatggacgacggtctgcgtttcgcaa

SEQ ID NO: 57 - DNA, 831 bp, Enterobacter sakazakii ATCC 29544
ggcgctatcctggttgttgctgcgactgacggcccgatgccgcagacccgtgagcacatcctgctgggtcgtcaggtaggcgttccgtacatcatcgtgttcctgaacaaatgcgacatggttgatgacgaagagctgctggaactggttgagatggaagtgcgcgagctgctgtctcagtacgacttcccgggcgacgacaccccgatcgttcgtggttctgctctgaaagcgctggaaggcgacgctgagtgggaagcgaaaatcatcgagctggcaggtcacctggattcctacatcccggaaccggagcgtgcgattgacaagccgttcctgctgccgatcgaagacgtattctccatctcyggtcgtggtaccgttgttaccggtcgtgtagagcgcggtatcatcaaggttggtgaagaagttgaaatcgtgggcatcaaagacaccgcgaaatccacctgtaccggcgttgaaatgttccgcaaactgctggacgaaggccgtgcgggcgagaacgtaggtgttctgctgcgtggtatcaaacgtgaagaaatcgaacgtggtcaggtactggctaagccgggctccatcaagccgcacaccaagttcgaatctgaagtgtacattctgtccaaagatgaaggcggccgtcacactccgttcttcaaaggctaccgtccgcagttctacttccgtacractgacgtgactggcaccatcgaactgccggaaggcgttgagatggtaatgccgggcgacaacatcaaaatggttgttaccctgatccacccgatcgcgatggacgacggtctgcgtttcgcaatc

SEQ ID NO: 58 - DNA, 835 bp, Enterococcus casseliflavus ATCC 25788
cggcgcgatcttagtagtatctgctgctgatggtcctatgcctcaaacacgtgaacacatcttgttatcacgtaacgttggtgtaccatacatcgttgttttcttaaacaaaatggatatggttgatgacgaagaattactagaattagttgaaatggaagttcgtgacttattgtcagaatatgacttcccaggcgacgatgttcctgtaatcgctggttctgctttgaaagctcytgaaggcgatgcttcatacgaagaaaaaatcatggaattaatggctgcagttgacgaatacgttccaactccagaacgtgacactgacaaaccattcatgatgccagtcgaagacgtattctcaatcactggacgtggtactgttgctacaggccgtgttgaacgtggacaagttcgcgttggtgacgaagttgaaatcgttggtattgctgaagaaactgctaaaacaactgtaactggtgttgaaatgttccgtaaattgttagactatgctgaagcaggggataacattggtgcattgctacgtggtgttgctcgtgaagacatccaacgtggacaagtattggctaaagctggtacaatcacacctcatacaaaatttaaagctgaagtttacgttttaacaaaagaagaaggtggacgtcacacaccattcttcactaactaccgtcctcagttctacttccgtacaactgacgtaactggtgttgttgaattaccagaaggaactgaaatggttatgcctggtgataacgtaacaatcgacgttgaattgatccacccaatcgctatcgaagacggaactcgtttctcaatt

SEQ ID NO: 59 - DNA, 826 bp, Enterococcus cecorum ATCC 43198
ggtgctatcttagtagtatctgctgctgatggtcctatgccacaaactcgtgaacacattcttttatcacgtaacgttggtgttccatacatcgttgttttcttaaacaaagttgatatggttgacgacgaagaattattagaattagttgaaatggaagtacgtgacttattaactgaatacgacttcccaggagacgatgttcctgtaatcgctggttctgcattaaaagctttagaaggcgacccatcttacgaagaaaaaatcttagaattaatggctgcagttgacgaatacatcccaactccagaacgtgacaacgataaaccattcatgatgccagtcgaagacgtattttcaatcactggtcgtggtactgttgctacaggtcgtgttgaacgtggacaagtacgtgttggtgacgaagttgaaatagttggtatccatgatgaaatttctaaaacaacagttactggtgttgaaatgttccgtaaattattagattacgctgaagctggagacaacatcggtgcattattacgtggtgtggctcgtgaagatatccaacgtggtcaagtattagctaaaccaggttcaatcactccacatacaaaattcactgctgaagtgtacgttttaactaaagaagaaggtggacgtcatactccattcttcactaactaccgtccacaattctacttccgtacaactgacgttacaggtgtagttaacttaccagaaggtactgaaatggttatgcctggtgataacgtaactatggaagttgaattaatccacccaatcgctatcgaagacggaactcgtt

SEQ ID NO: 60 - DNA, 835 bp, Enterococcus dispar ATCC 51266
cggcgcgatcttggtagtatctgctgctgatggtcctatgcctcaaactcgtgaacacatcctattgtcacgtaacgttggtgttccttacatcgtcgttttcttgaacaaaatggacatggttgatgacgaagaattattagaattagttgaaatggaagttcgtgacttattgtcagaatacgacttcccaggcgacgacactccagttatcgcaggttcagctttgaaagccttagaaggcgacgcttcatatgaagaaaaaatcttagaattaatggctgcagttgacgaatatatcccaactccagttcgtgatactgacaaaccattcatgatgccagtcgaagatgtattctcaatcactggtcgtggtactgttgcaactggtcgtgttgaacgtggacaagttcgcgttggtgacgaagttgaaatcgtaggtatcgctgaagaaactgctaaaactactgtaacaggtgttgaaatgttccgtaaattgttggattacgctgaagctggcgacaacattggtgcattattacgtggtgtggctcgtgaagatatccaacgtggtcaagtattatcaaaaccaggttcaatcactccacatacaaaatttgcggcagaagtttacgttttaactaaagaagaaggtggacgtcatactccattcttcactaactaccgcccacaattctacttccgtacaactgacgtaacaggtgttgttgaattaccagaaggtactgaaatggttatgcctggcgataacgttactatggacgttgaattaatccacccaatcgcgatcgaagacggtactcgtttctcaatc

SEQ ID NO: 61 - DNA, 835 bp, Enterococcus durans ATCC 19432
cggagctatcttagtagtttctgctgctgatggccctatgcctcaaactcgtgaacatatcctattatctcgtcaagttggtgttccttacatcgtygtattcttgaacaaagtagatatggtcgatgacgaagaattactagaattagttgaaatggaagttcgtgacttattaacagaatacgaattccctggtgacgatgttcctgtaatcgctggttcagctttgaaagctttagaaggcgacgcttcatacgaagaaaaaatccttgaattaatggctgcagttgacgaatatatcccaactccagaacgtgacaacgacaaaccattcatgatgccagttgaagatgtattctcratcactggtcgtggtactgttgctacaggtcgtgttgaacgtggacaagttcgcgttggtgacgttgtagatatcgttggtatcgcagaagaaacagctcaaacaacagttactggtgttgaaatgttccgtaaattattagrctacgctgaagctggagacaacattggtgctttactacgtggtgttgcacgtgaagacatccaacgtggacaagttttagctaaaccaggtacaatcackcctcatacaaaattctctgcagaagtatacgtgttgactaaagaagaaggtggacgtcatactccattcttcactaactaccgtccacaattctacttccgtacaactgacgtaacaggtgttgttgaattaccagaaggaactgaaatggttatgcctggcgacaacgtaacaatggaagttgaattaatccacccaatcgctatcgaaaatggtactaaattctcaatc

SEQ ID NO: 62 - DNA, 680 bp, Enterococcus faecalis strain R610
agtagtttctgctgctgatggtcctatgcctcaaacacgtgaacatatcttattatcacgtaacgttggtgtaccatacatcgttgtattcttaaacaaaatggatatggttgatgacgaagaattattagaattagtagaaatggaagttcgtgacttattatcagaatacgatttcccaggcgatgatgttccagttatcgcaggttctgctttgaaagctttagaaggcgacgagtcttatgaagaaaaaatcttagaattaatggctgcagttgacgaatatatcccaactccagaacgtgatactgacaaaccattcatgatgccagtcgaagacgtattctcaatcactggacgtggtactgttgctacaggccgtgttgaacgtggtgaagttcgcgttggtgacgaagttgaaatcgttggtattaaagacgaaacatctaaaacaactgttacaggtgttgaaatgttccgtaaattattagactacgctgaagcaggcgacaacatcggtgctttattacgtggtgtagcacgtgaagatatcgaacgtggacaagtattagctaaaccagctacaatcactccacacacaaaattcaaagctgaagtatacgtattatcaaaagaagaaggcggacgtcacactccattcttcactaactaccgtcctc

SEQ ID NO: 63 - DNA, 680 bp, Enterococcus faecalis strain R487; identical to SEQ ID NO: 62

SEQ ID NO: 64 - DNA, 685 bp, Enterococcus faecium strain R482
agtagtttctgctgctgacggcccaatgcctcaaactcgtgaacacatcctattgtctcgtcaagttggtgttccttacatcgttgtattcttgaacaaagtagacatggttgatgacgaagaattactagaattagttgaaatggaagttcgtgacctattaacagaatacgaattccctggtgacgatgttcctgtagttgctggatcagctttgaaagctctagaaggcgacgcttcatacgaagaaaaaattcttgaattaatggctgcagttgacgaatacatcccaactccagaacgtgacaacgacaaaccattcatgatgccagttgaagacgtgttctcaattactggacgtggtactgttgctacaggtcgtgttgaacgtggacaagttcgcgttggtgacgaagttgaagttgttggtattgctgaagaaacttcaaaaacaacagttactggtgttgaaatgttccgtaaattgttagactacgctgaagctggagacaacattggtgctttactacgtggtgttgcacgtgaagacatccaacgtggacaagttttagctaaaccaggtacaatcacacctcatacaaaattctctgcagaagtatacgtgttgacaaaagaagaaggtggacgtcatactccattcttcactaactaccgtcctcaattt

SEQ ID NO: 65 - DNA, 825 bp, Enterococcus flavescens ATCC 49996
cggcgcgatcttagtagtatctgctgctgatggtcctaygcctcaaacacgtgaacacatcttgttatcacgtaacgttggtgtaccatacatcgttgttttcttaaacaaaatggatatggttgatgacgaagaattactagaattagttgaaatggaagttcgtgacttattgtcagaatatgacttcccaggcgacgatgttcctgtaatcgctggttctgctttgaaagctcttgaaggcgatgcttcatacgaagaaaaaatcatggaattaatggctgcagttgacgaatacgttccaactccagaacgtgacactgacaaaccattcatgatgccagtcgaagacgtattctcaatcactggacgtggtactgttgctacaggccgtgttgaacgtggacaagttcgcgttggtgacgaagttgaaatcgttggtattgctgaagaaactgctaaaacaactgtaactggtgttgaaatgttccgtaaattgttagactatgctgaagcaggggataacattggtgcattgctacgtggggttgctcgtgaagacatccaacgtggacaagtattagctaaagctggtacaatcacacctcatacaaaatttaaagctgaagtttacgttttaacaaaagaagaaggtggacgtcacactccattcttcactaactaccgtcctcagttctacttccgtacaactgacgtaactggtgttgttgaattaccagaaggaactgaaatggttatgcctggtgataamgtaacaatcgacgttgaattgatccacccaatcgctatcgaagacggaactcg

SEQ ID NO: 66 - DNA, 636 bp, Enterococcus gallinarum strain R420
tcctatgcctcaaactcgtgaacacatcttgttatcacgtaacgttggcgtaccatacatcgttgttttcttgaacaaaatggatatggttgatgacgaagaattgctagaattagttgaaatggaagttcgtgacctattgtctgagtatgacttcccaggcgacgatgttcctgtaatcgccggttctgctttgaaagctcttgaaggagatccttcatacgaagaaaaaatcatggaattgatggctgcagttgacgaatacgttccaactccagaacgtgatactgacaaaccattcatgatgccagtcgaagacgtattctcaatcactggacgtggtactgttgctacaggccgtgttgaacgtggacaagttcgcgttggtgatgaagtagaaatcgttggtattgctgacgaaactgctaaaacaactgtaacaggtgttgaaatgttccgtaaattgttagactatgctgaagcaggggataacattggtgcattgctacgtggggttgctcgtgaagacatccaacgtggacaagtattggctaaagctggtacaatcacacctcatacaaaattcaaagctgaagtttatgttttgacaaaagaagaaggtggacgtcacactcc

SEQ ID NO: 67 - DNA, 835 bp, Enterococcus hirae ATCC 8043
cggagctatcttagtagtttctgctgctgatggtcctatgcctcaaactcgtgaacatatcctaytatctcgtcaagttggtgttccatacatcgttgtattcttgaacaaagtagatatggttgacgacgaagaattactagaattagttgaaatggaagttcgtgacttattaacagaatacgaattccctggtgacgatgttcctgtagttgctggtycagctttgaaagctttagaaggcgacgcttcatacgaagaaaaaatccttgaattgatggctgcagttgacgaatatatcccaactccagaacgtgacaacgacaaaccattcatgatgccagtcgaagacgtattctcaatcactggtcgtggtactgttgctacaggtcgtgttgaacgtggacaagttcgcgttggtgacgttgtagatatcgttggtatcgcagaagaaacagctcaaacaacagttactggtgttgaaatgttccgtaaattattagactacgctgaagctggagacaacattggtgctttactacgtggtgttgcacgtgaagacatccaacgtggacaagttttagctaaaccaggtacaatcacacctcatacaaaattctctgcagaagtatacgtgttgacaaaagaagaaggtggacgtcatactccattcttcactaactaccgtccacaattctacttccgtacractgacgtaacaggtgttgttgaattaccagaaggaactgaaatggttatgcctggcgacaacgtaacaatggaagttgaattaatccacccaatcgctatcgaaaacggtactaaattctcaatc

SEQ ID NO: 68 - DNA, 835 bp, Enterococcus mundtii ATCC 43186
cggagcaatcttagttgtttctgctgctgacggccctatgcctcaaactcgtgaacacatcctattatctcgtcaagttggtgtaccatacatcgttgtattcttgaacaaagtagatatggttgatgacgaagaattacttgaattagttgaaatggaagttcgtgacctattaacagaatacgaattccctggtgacgatgttcctgtaatcgctggttcagctttaagagctttagaaggcgacgctkcatacgaagaaaaaattcttgaattgatggctgcagttgacgaatatatcccaactccagaacgtgataacgacaaaccattcatgatgccagttgaggacgtattctcaatcactggtcgtggtactgttgctacaggacgtgttgaacgtggacaagytcgtgttggtgacgttatcgatatcgttggtatcgcagaagaaacagctcaaacaactgtaactggtgttgaaatgttccgtaaattattagactacgctgaagcaggcgataacattggtgcgttactacgtggtgtttcacgtgaagacatccaacgtggtcaagttttagctaaaccaggtacaatcacacctcatacaaaattctctgcagaagtatacgtgttgactaaagaagaaggtggacgtcatactccattcttcactaactaccgtccacaattctacttcygtacgactgacgtaactrgtgttgtygaattaccagaaggaactgaaatggttatgcctggcgacaacgtaacaatggaagttgaattaatccacccaatcgctatcgaaaatggtactaaattctcaatc

SEQ ID NO: 69 - DNA, 836 bp, Enterococcus pseudoavium ATCC 49372
cggagctatcttagtagtatctgctgctgatggccctatgcctcaaacacgtgaacacatcttgttatctcgtaacgttggtgttccttacatcgytgtattcttaaacaaaatggatatggttgatgacgaagaattactagaattagttgaaatggaagttcgtgacttattgtcagaatacgatttcccaggcgacgacactcyagttatcgctggttcagcyttgaaagctttagaaggcgacccttcatacraagaaaaaatcttagaattaatgsctgctgttgacgaatacatcccaacaccagttcgtgatactgacaaaccattcatgatgccagtcgaagacgtattctcaatcactggtcgtggtactgttgcaactggtcgtgttgaacgtggacaagttcgcgttggtgacgaagttgaaatcgtaggtatcgctgaagaaactgctaaaacaactgttacaggtgttgaaatgttccgtaaattgttagactacgctgaagcaggcgataacatcggtgcattattacgtggtgttgcacgtgaagacatccaacgtggacaagtattggctaaaccagcttcaatcactccacatacaaaattctctgcagaagtttacgttttaactaaagaagaaggcgggcgtcacactccgttcttcactaactaccgtcctcagttctacttccgtacaactgacgtaactggtgttgttgatctaccagaaggtactgaaatggtaatgcctggtgataacgtaactatggaagttgaattaatccacccaatcgcgatcgaagacggaactcgtttctctattc

SEQ ID NO: 70 - DNA, 835 bp, Enterococcus raffinosus ATCC 49427
cggagctrtcttagtagtatctgctgctgatggccctatgcctcaaactcgtgaacacatcttgttatctcgtaacgttggtgttccttacatcgttgtattcttaaacaaaatggatatggttgacgatgaagaattactagaattagttgaaatggaagttcgtgacttattaactgaatacgacttcccaggcgacgacactccagttatcgcaggttcagctttgaaagccttagaaggcgacgcttcatacgaagaaaaaatcttagaattaatggctgctgttgatgaatacatcccaacaccagttcgtgatactgacaaaccattcatgatgccagyggaagacgtaytctcaatcactggtcgtggaactgttgcaactggtcgtgttgaacgtggacaagttcgcgttggtgacgaagttgaaatcgtaggtattgctgaagaaactgctaaaacaactgttacaggtgttgaaatgttccgtaaattgttggattacgctgaagcgggcgacaacattggtgcattattacgtggtgttgcacgtgaagacatccaacgtggacaagtattggctaaaccagcttcaatcactccacatacaaaattctctgcagaagtttacgttttaactaaagaagaaggcggacgtcatactccattcttcactaactaccgtcctcagttctacttccgtacaactgacgtaactggtgtagttgatctaccagaaggtactgaaatggtaatgcctggtgataacgtaactatggaagttgaattaatccacccaatcgcgatcgaagacggaactcgtttctctatt

SEQ ID NO: 71 - DNA, 835 bp, Enterococcus saccharolyticus ATCC 43076
cggcgcgatcttagtagtatctgctgctgatggtcctatgcctcaaactcgtgaacacatcttgttatctcgtaacgtaggtgttccttacatcgttgtattcttaaacaaaatggatatggttgatgacgaagaattattagaattagtagaaatggaagttcgtgacttattatcagaatacgatttcccaggcgatgacactccagttattgcaggttctgctttgaaagctttagaaggcgatccagtttacgaagaaaaaatcttcgaattaatggctgcagttgacgaatatatcccaactccagaacgtgatactgaaaaaccattcatgatgccagttgaggatgtattctcaatcactggtcgtggtactgttgctacaggtcgtgttgaacgtggacaagttcgcgttggtgacgttgtagaaatcgttggtatcgacgaagaaacagctcaaactactgtaacaggtgttgaaatgttccgtaaattattagactacgctgaagcaggcgataacatcggtgctttattacgtggggttgctcgtgaagacatccaacgtggacaagtattagctaaaccaggaacaatcactcctcatacaaaattcgtagctgaagtttacgttttaactaaagaagaaggtggacgtcatactccattcttcactaactaccgtcctcaattctacttccgtacaactgacgtaactggtgttgtagaattacgcgaaggtactgaaatggtaatgcctggtgacaacgtaactatcgacgttgaattaatccacccaatcgctatcgaagacggaactcgtttctctatt

SEQ ID NO: 72 - DNA, 823 bp, Enterococcus solitarius ATCC 49428
gagctatcttggtagtttctgcagctgatggcccaatgccacaaactcgtgaacatattttgttgtcacgtaatgtaggtgtaccttacatcgttgtgttcttgaacaaaatggatatggttgatgacgaagaattacttgagttagttgaaatggaagtacgtgatctattatctgaatacgacttcccaggagatgatactccagttatttccggttcagctttgaaagctttagaaggcgacgaagaatatgaacaaaaaattatggacttaatggatgcagttgatgactacattccaactcctgaacgtgaccatgacaaaccattcatgatgccaattgaagatgtattttcaattacaggccgtggtactgttgctacaggacgtgttgaacgcgggactatcaaagtcggcgatgaagttgacattattggtattcatgaagacgttaaaaagacaacagttactggtgtagaaatgttccgtaaattgttggactacgctgaagcaggcgataacattggtactttgttacgtggtgtttctcgtgatgatatcgaacgtggtcaagtattagctaaaccaggttcaatcacaccacatacaagattctctgctgaagtttatgttttgactaaagaagaaggcggacgtcatactccattcttctcaaactatcgtcctcaattctacttccgtacaactgatatcactggtgtcattgaattgccagaaggtactgaaatggtaatgccaggtgataatgtaacaatggatgttgaattaatccacccagtcgctatcgaagaaggaactcg

SEQ ID NO: 73 - DNA, 835 bp, Enterococcus casseliflavus ATCC 25788
cggtgcaatcttggtcgtatcagcgacagatggcccaatgccacaaacacgggagcatattttgctttctcgtcaagtgggtgtgaaacatttgatcgtctttttgaataagacggaccttgtcgatgatgacgagttgatcgatttagttgaaatggaagtcagagaattgctgactgaatatgattttcctggcgacgacattcctgtgatcaagggctctgcgttaaaagccttggaaggggacccagatgctgaagcagcgatcttaacgctgatggatacagtagatgaatatatcccaacgccagaacgtgatactgacaaaccattgttgttaccgatcgaagatgtcttttcgatcacaggacgggggaccgttgcttctggtcggatcgatcgcggcatggtaaaagtcggggatgaagtagaaatcgtcggaatcaaacctgaaacacaaaaagcagtcgtgacaggggtagaaatgttccgcaaaacgatggacttcggagaagctggcgataacgtaggggtattgttacggggcatcacccgtgatgaaattgaacgtggccaagtgttagcaaaaccaggttctatcacaccgcatacgaaattccaagcggaagtctatgtgttgacaaaagaagaaggcggtcgccataccccattctttaataattatcgcccacaattttacttccgtacaacggacgtaactgggaatatcgttttaccagaaggaacggaaatggtgatgcctggtgacaacgtaacgatcgatgtggaattgatccatccgatcgctgtagaaaatggaacgaccttctcgatt

SEQ ID NO: 74 - DNA, 380 bp, Staphylococcus saprophyticus ATCC 15305
taacgggcgtctcgatagaaaaacacgtgaaaatcccaatgattataaacaatcaatatacgattttgctgaagctgtaacaaaaggtattaaggaacaaacaaataaaaattaataggcaacttaaccagaatcgttaaaactatatgaagattctggttttttaaattcaaaaagttttctaaaaaatttacttgcttttttaagtataggtataaaatacgattgattaaaacagtaaaggaaatgaatcatgaaacaattaactaagcctttatacttttacctattactttttattacaacaacgctgattggcgcgttactattatatttgccaatcacaggtaaacatcctattgattttgtggacgcccgtt

SEQ ID NO: 75 - DNA, 666 bp, Enterococcus flavescens ATCC 49996
gcaatcttggtcgtatcagcgacagatggcccaatgccacaaacacgggagcatattttgctttctcgtcaagtgggtgtgaaacatttgatcgtctttttgaataagacggaccttgtcgatgatgacgagttgatcgatttagttgaaatggaagtcagagaattgctgactgaatatgattttcctggcgacgacattcctgtgatcaagggctctgcgttaaaagccttggaaggggacccagatgctgaagcagcgatcttaacgctgatggatacggtagatgaatatatcccaacgccagaacgtgatactgacaaaccattgttgttaccgatcgaagatgtcttttcgatcacaggacgggggaccgttgcttctggtcggatcgatcgcggcatggtaaaagtcggggatgaagtagaaatcgtcggaatcaaacctgaaacacaaaaagcagtcgtgacaggggtagaaatgttccgcaaaacgatggacttcggagaagctggcgataacgtaggggtattgttacggggcatcacccgtgatgaaattgaacgtggccaagtgttagcaaaaccaggttctatcacaccgcatacgaaattccaagcggaagtctatgtgttgacaaaagaagaaggcggtcgccatacccca

SEQ ID NO: 76 - DNA, 751 bp, Enterococcus gallinarum ATCC 49573
tggtgcgattttagttgtatccgcaacagatggtccaatgcctcaaacccgggaacatatcttgctttcgagacaagttggtgtgaaacatctgattgttttcttgaacaaaatcgatttagtcgatgacgaagaattgattgatttagtagaaatggaagtaagagaactgctatctgaatataattttccaggggatgacattcctgttatcaaaggttcggcattaaaagcgttggaaggagaccctgatgcagaagctgccatcatggaattaatggatacagtagacagctatatcccaacacctgagcgtgatacagacaaaccattactcttgccagttgaagatgtcttttcgattactggacgaggaacagttgcttccggacggatcgatcggggaacagttcgggtaggcgatgaagtagaaatcgtcggtatcaaacctgaaacccaaaaagctgtagtgacaggcgtcgaaatgttccgcaagacgatggactttggggaagccggtgacaatgtaggtgtcttgctgagagggatcactcgtgacgaaattgaacgaggacaagtgttggctaaaccaggttcgatcacaccacatacaaaattccaagcagaagtttatgtattgacgaaagaagaaggtggtcgtcatacaccattcttcaacaactatcgtccacaattttatttccgtacaacggatgtgacagggaacattacattgcctgaaggaacagaa

SEQ ID NO: 77 - DNA, 834 bp, Ehrlichia canis strain Florida
tgcagcaatattagtagtgtctgcaactgatggagcaatgccacaaacaagagaacatatattattagcaaagcaagtaggtgtaaaagatatagtagtgtggatgaataagtgtgatgttgtagatgatgaagaaatgttgtcattagttgaaatggaaataagggaattgttatcaaaatatgggtatcctggggatgatatagatgtagttagaggatctgcagttaaagcattagaagaagaaacaggctcaggtgtgtggagtgaaaaaataatggaattgatgaatgctttagaaaaaataagtttaccagtaagagaaaaagataagccatttttaatgtcaatagaagatgtgttttcaatacctggaagaggtacagtagtaacaggaagaatagaaagaggagtaattagagtaggggataaaatagagatagtaggattgcgtgagatacaaagtacagtatgtacaggtgttgaaatgtttcataaagcattagatgcaggagaagcaggggataatgctggaatattgttaagagggataaaaaaagaagatgtagaaagagggcaagtattgagtgcacctggacagatacattcatataagagatttaaggcagaggtatatatattgaaaaaagaagaaggaggaagacatactccatttttctcaaattaccagccgcaattttatgttagaacaacagatgtaacagggaatataaagttaccagaaggagtagaaatggtaatgccaggggataatataaatatcgaagtgagtttggataagcctgttgctattgatcaaggattgagatttgc

SEQ ID NO: 78 - DNA, 817 bp, Escherichia coli ATCC 23511
cggcgcgatcctggtagttgctgcgactgacggcccgatgccgcagactcgtgagcacatcctgctgggtcgtcaggtaggcgttccgtacatcatcgtgttcctgaacaaatgcgacatggttgatgacgaagagctgctggaactggttgaaatggaagttcgtgaacttctgtctcagtacgacttcccgggcgacgacactccgatcgttcgtggttctgctctgaaagcgctggaaggcgacgcagagtgggaagcgaaaatcctggaactggctggcttcctggattcttayattccggaaccagagcgtgcgattgacaagccgttcctgctgccgatcgaagacgtattctccatctccggtcgtggtaccgttgttaccggtcgtgtagaacgcggtatcatcaaagttggtgaagaagttgaaatcgttggtatcaaagagactcagaagtctacctgtactggcgttgaaatgttccgcaaactgctggacgaaggccgtgctggtgagaacgtaggtgttctgctgcgtggtatcaaacgtgaagaaatcgaacgtggtcaggtactggctaagccgggcaccatcaagccgcacaccaagttcgaatctgaagtgtacattctgtccaaagatgaaggcggccgtcatactccgttcttcaaaggctaccgtccgcagttctacttccgtactactgacgtgactggtaccatcgaactgccggaaggcgtagagatggtaatgccgggcgacaacatcaaaatggttgttaccctgatccacccgatcgcgatggacgacggt

SEQ ID NO: 79 - DNA, 825 bp, Escherichia fergusonii ATCC 35469
cgatcctggtagttgctgcgactgacggcccgatgccgcagactcgtgagcacatcctgctgggtcgtcaggtaggcgttccgtacatcatcgtgttcctgaacaagtgcgacatggttgatgacgaagagctgctggaactggttgaaatggaagttcgtgaacttctgtctcagtacgacttcccgggcgacgacactccgatcgttcgtggttctgctctgaaagcgctggaaggcgacgcagagtgggaagcgaaaatcctggaactggctggcttcctggattcttacattccggaaccagagcgtgcgattgacaagccgttcctgctgccgatcgaagacgtgttctccatctccggtcgtggtaccgttgttaccggtcgtgtagaacgcggtatcatcaaagttggtgaagaagttgaaatcgttggtatcaaagagactcagaagtctacctgtactggcgttgaaatgttccgcaaactgctggacgaaggccgtgctggtgagaacgtaggtgttctgctgcgtggtatcaaacgtgaagaaatcgaacgtggtcaggtactggctaagccgggcaccatcaagccgcacaccaagttcgaatctgaagtgtacattctgtccaaagatgaaggcggtcgtcatactccgttcttcaaaggctaccgtccgcagttctacttccgtactactgacgtgactggtaccatcgaactgccggaaggcgtagagatggtaatgccgggcgacaacatcaaaatggttgttaccctgatccacccgatcgcgatggacgacggtctgcgtttcgcaa

SEQ ID NO: 80 - DNA, 829 bp, Escherichia hermannii ATCC 33650
ggcgcgatcctggttgttgctgcgactgacggcccgatgccgcagacccgtgagcacatcctgctgggtcgtcaggtaggcgttccgtacatcatcgtgttcctgaacaaatgcgacatggttgatgacgaagagctgctggaactggttgagatggaagttcgcgaactgctgtcccagtacgatttcccgggcgacgacaccccgatcgttcgtggttccgcgctgaaagcgctggaaggcgaagcagagtgggaagagaaaatcatcgaactggctggctacctggattcctatatcccggaaccagagcgtgcgattgacaagccgttcctgctgcctatcgaagacgtattctccatctccggccgtggtaccgttgttaccggtcgtgtagagcgcggtatcatcaaagtgggtgaagaagttgaaatcgtgggtatcaaagatactgcgaaatcaacctgtaccggcgttgaaatgttccgcaaactgctggacgaaggccgtgcgggcgagaacgtgggtgttctgctgcgtggtatcaaacgtgaagaaatcgaacgtggtcaggtactggctaagccgggttccatcaagcckcacaccaagttcgaatctgaagtgtacattctgtccaaagacgaaggcggccgtcacactccgttcttcaaaggctaccgtccgcagttctacttccgtacaactgacgtgactggcaccatcgaactgccggaaggcgttgagatggtaatgccgggcgacaacatcaaaatggttgttaccctgatccacccgatcgcgatggacgacggtctgcgtttcgcaa

SEQ ID NO: 81 - DNA, 816 bp, Escherichia vulneris ATCC 33821
cggcgcgatcctggttgttgctgcgactgacggcccgatgccgcagacccgtgagcacatcctgctgggtcgtcaggtaggcgttccgtacatcatcgtgttcctgaacaaatgcgacatggttgatgacgaagagctgctggaactggttgagatggaagtgcgtgaacttctgtcccagtacgacttcccgggcgacgacaccccgatcattcgtggttctgcgctgaaagcgctggaaggcgaagctgagtgggaagagaaaatcgttgagctggctggctacctggattcctacatcccggaaccagagcgtgcgattgacaagccgttcctgctgccgatcgaagacgtattctccatctccggtcgtggtaccgttgttaccggtcgtgtagagcgcggtatcatcaargtkggtgaagaagttgaaatcgtgggtatcaaagatactgcgaaatctacctgtaccggcgttgaaatgttccgcaaactgctggacgaaggtcgtgcaggcgagaactgcggcgttctgctgcgtggtatcaagcgtgaagagatccagcgtggccaggttctggctaagccgggctcaatcaagccgcacaccaagttcgaatccgaagtgtacatcctgtccaaagacgaaggcggccgtcacactccgttcttcaaaggctaccgtccgcagttctacttccgtacaactgacgtgactggcaccatcgaactgccggaaggcgtagagatggtaatgccgggcgacaacatcaaaatggttgttaccctgatccatccgatcgcgatggacgacgg

SEQ ID NO: 82 - DNA, 828 bp, Eubacterium lentum ATCC 43055
cggcgcctcctcgttatcgccgccaccgacggcccgatggcccagacccgcgagcacatcctgctcgcccgtcaggtcggcgtgccctacatcgtggtcttcctgaacaagtgcgacatggtcgacgacgaggagctcctcgagctcgtcgagatggaagttcgcgagctgctcgactcttacgagttcccgggcgacgacaccccgatcatccgcggctccgctttgaaggccctcgagggcgacaaagagtggcaggagaaggtctgggagctcatggacgccgtcgactcctacatcccgacgccggagcgcatggtcgacaagccgttcctgatggccgtcgaggacacgatgaccatcaccggccgcggcaccgttgccaccggtcgtgtggagcgtggtacgctgcatgtcaacgacccgctggagatcgtcggtatcaaggagacccagaacacggtctgcaccggtatcgagatgttccgcaagctgctcgacgaggctcaggccggcgacaacatcggctgcctgctccgcggtgtcaagcgcgaggagatcgttcgcggccaggttctctgcaagcccggtagcgtgaccccgcacaccgagttcgagggtcaggtctacatcctgacgaaggaagagggcggccgccacacgccgttcttcgacggctaccgtccgcagttctacttccgcacgacggacgtgacgggtgttgcccaccttcccgagggcaccgagatggtcatgccgggcgacaacgtggagatcaagggcgagctcattcacccgatcgccaggaagagggctgcgttcgctaac

SEQ ID NO: 83 - DNA, 835 bp, Eubacterium nodatum ATCC 33099
ggagcaattctggtttgtgcagcaackgacggaccaatgcctcagacaagagaacatatccttttgtcaaggcaggtaggagtgccatatatcatcgtattcctgaataaatgtgacatggtggatgaygaagagcttctggacttggtagagatggaagtaagagaacttctcagtgagtatgaattcccgggagatgataccccgatagtaagaggttcagccctgaaggcactggaagaacccaatggagaatgggcagacaagattgtagagctgatggaggaagtagataaatacattcctgaaccaaagagagataacgacaaaccgttcctgatgcctgtagaggacgtattctcaataacaggaagaggaacagtagcgacaggaagrgttgaaagaggaatcctgaaggtcggtgatgaagtagaaatcgtgggaatgagcgaagagagaagaaaggtagtagtaacgggagttgaaatgttcagaaagcttctggatgaagcagagacaggagacaacatcggagcactgctgagaggagttcagagaacrgagatccagagaggtcaggtattggcrgcacctggaacgatcaacccacatacaaagttcaagggtcaggtatatgtactgaagaaggaagaaggaggaaggcatacgccgttcttcaayggatacagwccacagttctacttcagaacaacagacgtaacaggagatttgcagctgccggaaggarcagagatgtgcatgccgggagataatgtggtaatgaacrtcagcctgatcactccgattgctatagaagagggwctgagatttgcca

SEQ ID NO: 84 - DNA, 826 bp, Ewingella americana ATCC 33852
gcgatcctggttgttgctgcaactgatggccctatgccacagactcgtgagcacatcctgttgggtcgycaggttggcgttccattcatgatcgtattcatgaacaaatgcgacatggttgatgacgaagagctgctggaactggtagaaatggaagttcgygaacttctgtctgcttacgatttcccaggcgacgacatcccagttgttaaaggttcagcgctgaaagcactggaaggcgaagcagagtgggaagctaagatcatcgagctggctggccacctggatagctacatcccagaaccagagcgtgcgattgacaagccattcctgctgccaatcgaagacgtattctccatctccggtcgtggtaccgttgttaccggtcgtgtagagcgcggtatcatcaaagttggcgaagaagttgaaatcgttggtatcaaggacactgttaagtctacttgtactggcgttgaaatgttccgcaaactgctggacgaaggccgtgcyggtgagaacgttggtgttctgctgcgtggtatcaagcgtgaagacatcgaacgtggtcaggttctggctaaaccaggttcaatcaaaccacacaccacwttygactcagaagtttatatcctgagcaaagatgaaggcggccgtcatactccgttcttcaaaggctaccgtccacagttctacttccgtacaactgacgtgaccggtaccatcgaactgccagaaggcgtagagatggtaatgccaggtgacaacatcaacatgrtagttaccctgatccacccaatcgcgatggatgacggtctgcgtttcgcaa

SEQ ID NO: 85 - DNA, 828 bp, Francisella tularensis strain LVS
tggtgctattctagtatgttctgctgcggatggtcctatgccacaaactcgtgagcacattctgctttctcgtcaagttggtgtaccaaaaatcgttgttttcttaaacaagtgtgacatggttgatgatgaagagttattagagctagttgagatggaagttcgtgagcttttagatcagtatgagttcccaggtgatgacactccagttattatgggttcagctcttagagctattgaaggtgacgaagcttacgttgagaaaattgttgagctagttcaagctatggatgactatattcctgctcctgagcgtgatactgagaagccatttattcttccgatcgaagatgtattctcaatttcaggtcgtggtactgttgtaactggtcgtattgagcgcggtgtagttaacgttggtgatgaagttgaagttgttggtattcgtccaactcaaaaaactacagtaactggtgtggaaatgttccgtaagcttttagatagaggggaagctggtgataacgttggtatcctagttcgtggacttaagagagatgatgttgagcgtggacaagtattatgtaagccaggttcaattaagccacatactaagtttgaagctgaggtttatgtattatctaaagaagagggtggtagacatactccattcttcaagggatatagaccacaattctacttccgtactacagacattactggagctgttgagcttccagagggtgtagaaatggttatgcctggtgataacgttaagatgactatcactctaattaacccaatcgctaggatgaagggttacgttttgca

SEQ ID NO: 86 - DNA, 829 bp, Fusobacterium nucleatum subsp. polymorphum ATCC 10953
  misc_feature (1)...(829): n=a,t,c or g
cggtgctatcatcgtagktgctgctactgatggtccgatgcctcaractcgtgagcayatcytgctggctcgtcaggtaaacgtwcckagactggttgtattcatgaacaagtgygacatggtagacgacgctgaaatgytggaactcgttgaaatggaaatgcgtgaactgctttcagcytacgaattcgayggygacaacactcckttcattcagggttctgctcttggtgcrttgaayggcgttgaaaagtgggaagagaaggttatgganctgatggatgcttgcgacacttggattcctttgcctccgcgtgatattgayaaaccgttcttgatgccggttgaagacgtattctcaatcactggtcgtggtactgtagctactggtcgtatcgaagctggtgttatccatgtaggtgacgaagttgaaatcctcggtttgggtgaagacaagaagtctgttgtaactggtgttgaaatgttccgcaagttgctggatcaaggtgaagctggtgacaacgtaggtytgttgctccgtggtatcgacaagaacgaaatcaaacgtggtatggttctttgtaagcccggtcagattaaacctcactctaagttcaaagcttctatctacgttttgaagaaagaagaaggtggtcgtcacactccgttccacaacaaataccgtcctcagttctatctgcgtactatggactgtacaggtgaaatcwctcttccggaaggaactgaaatggtaatgcctggtgataacgtagaaatcactgtagaactgatctacccggtagcattgaacgtaggtttgcgtttcgct

SEQ ID NO: 87 - DNA, 828 bp, Gemella haemolysans ATCC 10379
ctatcttagtaatcgctgctacagatggaccaatggctcaaactcgtgagcacatcctattatctcgtaacgttggagtaccaaaaatcgttgtattcttaaacaaatgtgatatggttgatgacgaagagttattagaattagttgaaatggaagttcgtgaactattatctgaatacggattcgacggagatgaactaccagtaatcaaaggttctgctcttaaagctcttgaaggagatgcagatgcagaaaaagctatcatcgaattaatggaaacagttgacgaatacatcccaactccagaacgtgataacgctaaaccattcatgatgccagttgaggacgtattctcaatcacaggtcgtggtacagttgctactggacgtgttgaacgtggacaagttaaagttggagacgtagtagaaatcgttggattaactgaagaaccagcttcaactactgtaacaggtgttgaaatgttccgtaaattattagattacgctgaagcaggagataacatcggtgcattattacgtggtgttgctcgtgaagacatcgaacgtggacaagttttagcagctcctaaaacaatcactccacacactcaattcgtagctgacgtgtacgtattatctaaagaagaaggtggacgtcacactccattcttcacaaactaccgtcctcaattctacttccgtactactgacgtaactggtgtagttactttaccagaaggtactgaaatggtaatgcctggggataacgtatcaatcaacgtagaacttatttctccaatcgcgatcgaagaaggaactcgtttctcaa

SEQ ID NO: 88 - DNA, 823 bp, Gemella morbillorum ATCC 27824
tcttagtaatcgctgctacagatggtcctatggctcaaactcgtgaacacatcctattatctcgtaacgttggagtacctaaaattgttgtattcttaaacaaatgtgatatggttgatgacgaagagttattagaattagtagaaatggaagttcgtgaactattatctgaatacggatttgatggagatgaactaccagtaatcaaaggttcagctcttaaagctcttgaaggagatgcagatgctgaaaaagctatcatcgaattaatggaaacagttgacgagtacatcccaactccagaacgtgataacgctaaaccatttatgatgccagttgaggacgtgttctcaatcacaggtcgtggtacagttgctactggacgtgttgaacgtggacaagttaaagttggtgacgtagtagaaatcgttggattaactgaagaaccagcttcaactactgtaacaggtgttgaaatgttccgtaaattattagattacgctgaagcaggagataacatcggtgcattattacgtggtgttgctcgtgaagatatcgaacgtggacaagttttagcagctcctaaaacaatcactccacatactcaattcgtagctgatgtgtacgtattatctaaagaagaaggtggacgtcacactccattcttcacaaactaccgtccacaattctacttccgtactactgacgtaactggtgtagttactttaccagaaggtactgaaatggtaatgcctggggacaacgtatcaatcaacgtagaacttatttctccaatcgctatcgaagaaggaactcgtttctc

SEQ ID NO: 89 - DNA, 829 bp, Haemophilus actinomycetemcomitans ATCC 33384
gctatcttagtagtagcagcaaccgacggtcctatgccacaaactcgtgagcacatcttattaggtcgccaagtaggtgttccttacatcatcgtattcttaaacaaatgcgacatggtagatgacgaagagttattagaattagttgaaatggaagttcgtgaacttctttctcaatatgacttcccgggcgatgacaccccaatcgtacgcggttctgcattaaaagcgcttgaaggcgatgccgcatgggaagaaaaaatccttgaattagcaaaccatttagatacttacatcccggaacctgagcgtgctatcgaccaaccgttccttcttccaattgaagatgtgttctctatctccggtcgtggtaccgtagtaacgggtcgtgttgagcgcggtatcatccgtaccggtgatgaagttgaaatcgtgggtatcaaaccgactgcaaaaaccaccgtaaccggtgttgaaatgttccgtaaattacttgacgaaggtcgtgcgggtgaaaacatcggtgcattattgcgtggtactaaacgtgaagaaatcgaacgtggtcaggtattggcgaaaccggggtcaatcaccccgcacactgacttcgaatctgaagtgtacgtattgtccaaagaagaaggtggtcgtcatactccattcttcaaaggttaccgtccacaattctatttccgtacaactgacgtaaccggtactatcgagttacctgaaggcgtggaaatggttatgcctggcgataacatcaaaatgaccgtatccttaattcacccaattgcgatggaccaaggtttacgtttcgctatcg

SEQ ID NO: 90 - DNA, 833 bp, Haemophilus aphrophilus ATCC 33389
tggtgctatcttagtagtagcagcaactgatggtcctatgccacaaactcgtgagcacatcttattaggtcgccaagtaggtgttccttacatcatcgtattcttaaacaaatgcgacatggtagatgacgaagagttattagaattagttgaaatggaagttcgtgaacttctttctcaatatgacttcccgggtgatgatacaccaatcgtacgtggttctgcattacaagcgttaaacggcgttgcagaatgggaagaaaaaatccttgaattagcaaaccacttagatacttacattcctgagccacaacgtgctatcgaccaaccgttccttcttccaattgaagacgtgttctctatctccggtcgtggtactgtagtaacaggtcgtgttgagcgtggtatcatccgtaccggtgatgaagttgaaatcgtaggtatcaaaccgactgcgaaaactaccgtaaccggtgttgaaatgttccgtaaattacttgacgaaggtcgtgcaggtgaaaacatcggtgcattattacgtggcactaaacgtgaagaaatcgaacgtggtcaagtattggctaaaccgggctcaatcactccgcacactgatttcgaatctgaagtgtacgtattatccaaagaagaaggtggtcgtcatactccattcttcaaaggttaccgtccacaattctatttccgtacaactgacgtaaccggtactatcgagttaccggaaggcgtggaaatggttatgcctggcgataacatcaaaatgactgtatccttaatccacccaatcgcgatggaccaaggtttacgtttcgctatcg

SEQ ID NO: 91 - DNA, 815 bp, Haemophilus ducreyi DSM 8925
cggcgctatcttagttgtagcagcaactgatggtcctatgcctcaaactcgtgaacacatcttattaggccgccaagttggtgttccttacatcatcgtattcttaaataaatgcgatatggtagatgatgaagaattattagaattagttgaaatggaagttcgtgaacttctttctcaatatgatttcccaggtgacgatactcctatcgttcgtggttcagcattacaagcattaaatggtgtgcctgagtgggaagaaaaaatcattgaattagcacaacacttagattcttatatccctgagcctgagcgtgcgattgataaacctttcttattaccaatcgaagacgtattctcaatttcaggtcgtggtacagtagtaaccggtcgtgttgagcgtggtatcatcaaatcaggtgaagaagttgaaatcgtagggattaaagaaacgacaaaaacaacagtaaccggtgttgagatgttccgtaaactattagacgaaggtcgtgcgggtgaaaacgtaggtgccttattacgtggtactaaacgtgaagaaatcgaacgtggtcaagtattagcgaaaccaggtacaattacaccacacactgattttgaatcagaagtttatgtattatcaaaagaagaaggtggtcgtcatactccattcttcaaaggttatcgtcctcagttctacttccgyacaacggacgtaacaggaacgattgaattacctgaagatgttgagatggtaatgcctggtgataatatcaagatgacagtaagcttaattcaccctatcgcgatggacgaag

SEQ ID NO: 92 - DNA, 830 bp, Haemophilus haemolyticus ATCC 33390
tggtgctatcttagtagtagcagcaactgatggtccaatgccacaaactcgtgagcacatcttattaggtcgccaagtaggtgttccatacatcatcgtattcttaaacaaatgcgacatggtagatgacgaagagttattagaattagtagaaatggaagttcgtgaacttctttctcaatatgacttcccaggtgacgatacaccaatcgtacgtggttctgcattacaagcattaaatggcgtagcagaatgggaagaaaaaatccttgagttagcaaaccacttagatacttacatcccagaaccagagcgtgcaattgaccaaccgttccttcttccaatcgaagatgtgttctcaatctcaggtcgtggtacagtagtaactggtcgtgtagaacgtggtatcatccgtactggtgatgaagtagaaatcgtaggtatcaaagatacagcaaaaactactgtaacgggtgttgaaatgttccgtaaattacttgacgaaggtcgtgcaggtgaaaacatcggtgcattattacgtggtaccaaacgtgaagaaatcgaacgtggtcaagtattagcgaaaccaggttcaatcacgccacacactgacttcgaatcagaagtttatgtattatcaaaagaagaaggtggtcgtcatactccattcttcaaaggttaccgtccacaattctatttccgtacaactgacgtaactggtactatcgagttaccagaaggcgtagaaatggtaatgccaggcgataacatcaagatgacagtaagcttaatccacccaatcgcgatggaccaaggtttacgtttcgcaa

SEQ ID NO: 93 - DNA, 824 bp, Haemophilus parahaemolyticus ATCC 10014
tcttagtagtagcagcaacagacggtccaatgccacaaactcgtgagcacatcttattaggtcgccaagtaggtgttccatacatcatcgtattcttaaacaaatgcgatatggttgacgatgaagaattattagaattagttgaaatggaagtgcgtgaacttctttcacaatatgacttcccaggtgatgacacgccagtagtacgtggttcagcgttacaagcgttaaacggcgtagcagagtgggaagaaaaaattcttgaattagcaaaccacttagatacatacatcccagagccagagcgtgcgattgataaaccattcttattaccaatcgaagacgtattctcaatctcaggtcgtggtacagtagtaacaggtcgtgttgagcgtggtatcatcaaagcgggtgaagaagttgaaatcgtaggtatcaaagacactgcgaaaacaacagtaactggcgtggaaatgttccgtaaattattagacgaaggtcgtgcgggtgaaaacgttggtgcattattacgtggtacaaaacgtgaagaaatcgaacgtggtcaagtgttagcgaaaccaggtacaattacaccacacacagacttcgaatcagaagtgtacgtattatcaaaagaagaaggtggtcgtcacactccattcttcaaaggttaccgtccacaattctacttccgtacaactgacgtaactggtactattgaattaccagaaggcgtagaaatggtaatgccaggcgataacatcaaaatgacagtatcattaatccacccaatcgcgatggacgaaggtttacgttttgcgatt

SEQ ID NO: 94 - DNA, 833 bp, Haemophilus parainfluenzae ATCC 7901
tggtgctatcttagtagtagcagcaactgatggtcctatgccacaaactcgtgagcacatcttattaggtcgccaagtaggtgttccttacatcatcgtgttcttaaacaaatgcgacatggtagatgacgaagagttattagaattagttgaaatggaagttcgtgaacttctttctcaatatgacttcccgggtgacgatacaccaatcgtacgtggttctgcattacaagcgttaaacggcgtwgcagaatgggaagaaaaaatccttgaattagctagccacttagattcttacattcctgagcctcaacgtgctatcgaccaaccgttccttcttccaatcgaagacgtgttctctatctccggtcgtggtacagtagtaacaggtcgtgttgagcgtggtatcatccgtaccggtgatgaagttgaaatcgtaggtatcaaaccgactgcgaaaactaccgtaaccggtgttgaaatgttccgtaaattacttgacgaaggtcgtgcaggtgaaaacatcggtgcattattacgtggtacyaaacgtgaagaaatcgaacgtggtcaagtattggctaaaccgggttcaatcactccacacactgatttcgaatctgaagtgtacgtattatccaaagaagaaggtggtcgtcatactccattcttcaaaggttaccgtccacaattctatttccgtacaactgacgtaaccggaactatcgaattaccggaaggcgtggaaatggttatgcctggtgataacatcaaaatgactgtatccttaatccacccaatcgcgatggaccaaggtttacgtttcgctatcg

SEQ ID NO: 95 - DNA, 824 bp, Haemophilus paraphrophilus ATCC 29241
tggtgctatcttagtagtagcagcaactgatggtcctatgccacaaactcgtgagcacatcttattaggtcgccaagtaggtgttccttacatcatcgtattcttaaacaaatgcgacatggtagatgacgaagagttattagaattagttgaaatggaagttcgtgaacttctttctcaatatgacttcccgggtgacgatacgccaatcgtacgtggttctgcattacaagcgttaaacggcgttgcagaatgggaagaaaaaatccttgaattagcaaaccacttggatacttacattcctgagccacaacgtgctatcgaccaaccgttccttcttccaatcgaagacgtgttctctatctccggtcgtggtacagtagtaacaggtcgtgttgagcgtggtatcatccgtaccggtgatgaagttgaaatcgtaggtatcaaaccgactgcgaaaactaccgtaaccggtgttgaaatgttccgtaaattacttgacgaaggtcgtgcaggtgaaaacatcggtgcattattacgtggtaccaaacgtgaagaaatcgaacgtggtcaagtattggctaaaccgggttcaatcactccacacactgatttcgaatctgaagtgtacgtattatccaaagaagaaggtggtcgtcatactccattcttcaaaggttaccgtccacaattctatttccgtacaactgacgtaaccggtactatcgagttaccggaaggtgtggaaatggtaatgcctggcgataacatcaaaatgaccgtatccttaatccacccaatcgcgatggaccaaggtttacgtt

SEQ ID NO: 96 - DNA, 818 bp, Haemophilus segnis ATCC 33393
gctatcttagtagtagcagcaactgatggtcctatgccacaaactcgtgagcacatcttattaggtcgccaagtaggtgttccttacatcatcgtattcttaaacaaatgcgacatggtagatgacgaagagttattagaattagttgaaatggaagttcgtgaacttctttctcaatatgacttcccaggtgatgatactccaatcattcgtggttctgcattacaagcgttaaacggcgtagcagaatgggaagaaaaaatccttgaattagctcaagcattagatacttacattcctgaacctgagcgtgcaatcgaccaaccgttccttcttccaattgaagacgtgttctcaatctctggtcgtggtactgtagtaacaggtcgtgtagagcgtggtatcatccgtaccggtgatgaagttgaaatcgttggtatcaaaccaactgcgaaaacaaccgtaaccggtgttgaaatgttccgtaaattacttgacgaaggtcgtgcaggtgaaaacatcggtgcattattacgtggtactaaacgtgaagaaatcgaacgtggtcaagtattagcgaaaccgggttcaatcactccacacactgacttcgaatctgaagtgtacgtattatctaaagaagaaggtggtcgtcatactccattcttcaaaggttaccgtccacaattctatttccgtacaactgacgtaaccggtactatcgagttaccggaaggcgtggaaatggttatgcctggcgataacatcaaaatgaccgtatccttaatccacccaatcgcgatggaccaaggtttacg

SEQ ID NO: 97 - DNA, 763 bp, Hafnia alvei ATCC 13337
cggcgctatcctggttgttgctgcgactgacggccctatgcctcagactcgtgagcacatcctgctgggtcgtcaggttggcgttccttwcatcatcgtrttcctgaacaaatgcgacatggttgatgatgaagagctgctggaactggtagaaatggaagttcgtgaacttctgtctcagtacgacttcccwggygatgatactccaatcatccgtggttctgctctgaaagcgctggaaggygmacctgagtgggaagctaagatcgtagaactggctgaaactctggattcttacatyccacarccagaacgtgctatcgayaagccattcctgctgccaatcgaagacgtattctctatctctggccgtggtacwgttgttaccggtcgtgtagagcgcggtatcgttaaagttggtgaagaagttgaratcgttggtatcaaagataccgttaaatcaacttgtaccggcgttgaaatgttccgtaaactgctggacgaaggtcgtgcaggcgagaacgttggtgttctgctgcgtggtatcaagcgtgaagacatcgaacgtggtcaggttctggctaaaccaggytcyatcaagccacacaccaagttcgaatcagaagtttatattctgagcaaagatgaaggcggycgtcatactccgttcttcaaaggctaccgtccacagttctacttccgtacaactgacgtgaccggtaccatcgaattgccagaaggcgtggaaatggtaatgccaggc

SEQ ID NO: 98 - DNA, 828 bp, Kingella kingae ATCC 23330
cggcgcaatcttggtatgttcagcagctgacggtcctatgccacaaactcgcgaacacatcttgttggctcgccaagtaggtgtaccttatatcatcgtattcatgaacaaatgcgacatggtcgatgatgctgagttgttggaattggttgaaatggaaatccgtgacttgttgtctagctacgattttccaggcgacgattgcccaatcgttcaaggttctgcattgcgygcattggaaggcgacgctgcatacaaagaaaaaatctttgaattggctgctgctttggatagctacattcctactccagaacgtgctgttgataaaccattcttgttgccaatcgaagatgtattctctatctctggtcgtggtacagtagttactggtcgtgtagagcgcggtatcatcaaagtaggcgaagagattgaaatcgttggtttgaaagacacgcaaaaaaccacttgtactggcgtggaaatgttccgcaaattgttggacgaaggtcaagctggtgataacgttggtgtattattgcgtggtacgaagcgtgaagacgttgaacgtggtcaggtattggctaaaccaggttctatcactccgcacactaaatttgaagctgaagtgtatgtgttgagcaaagaagaaggtggccgtcatacgccattcttcgctaactaccgcccacaattctacttccgtacgactgacgtaactggtgcagttactttgtctgagggtgtggaaatggttatgccaggcgaaaacgtgaaaatcactgttgagttgattgcacctatcgctaggaaaacggtttgcgttttgcg

SEQ ID NO: 99 - DNA, 828 bp, Klebsiella ornithinolytica ATCC 31898
ggcgcgatcctggttgttgctgcgactgacggcccgatgccgcagactcgtgagcacatcctgctgggtcgtcaggtaggcgttccgtacatcatcgtgttcctgaacaaatgcgacatggttgatgacgaagagctgctggagctggttgaaatggaagtccgtgagctgctgtctcagtacgacttcccgggcgacgacacgccgatcgttcgtggttccgctctgaaagcgctggaaggcgaagcagactgggaagcgaaaatcatcgaactggctggctacctggattcttacatcccggaaccagagcgtgcgattgacaagccgttcctgctgccgatcgaagacgtattctccatctccggtcgtggtaccgttgttaccggtcgtgtagagcgcggtatcatcaaagtgggcgaagaagttgaaatcgttggtatcaaagagactgcgaagtctacctgtactggcgttgaaatgttccgcaaactgctggacgaaggccgtgctggtgagaacgttggtgttctgctgcgtggtatcaaacgtgaagaaatcgaacgtggtcaggtactggctaagccgggctctatcaagccgcacaccaagttcgaatctgaagtgtacattctgtccaaagacgaaggcggccgtcatactccgttcttcaaaggctaccgtccgcagttctacttccgtacaactgacgtgactggcaccatcgaactgccggaaggcgtagagatggtcatgccgggcgacaacatcaaaatggttgttaccctgattcacccgatcgcgatggacgatggtctgcgtttcgca

SEQ ID NO: 100 - DNA, 749 bp, Klebsiella oxytoca ATCC 33496
gatgccgcagactcgtgagcacatcctgctgggtcgtcaggtaggcgttccgtacatcatcgtgttcctgaacaagtgcgacatggttgatgacgaagagctgctggaactggttgaaatggaagttcgtgaacttctgtctcagtacgatttcccgggcgacgacactccgatcgttcgtggttctgctctgaaagcgctggaaggcgacgcwgagtgggaakckaaaatcatcgaactggctggcttcctggattcttacattccggaaccagagcgtgcgattgacaagccgttcctgctgccgatcgaagacgtattctccatctccggtcgtggtaccgttgttaccggtcgtgtagagcgcggtatcatcaaagttggcgaagaagttgaaatygttggtatyaaagacactgctaagtctacctgtactggcgttgaaatgttccgcaaactgctggacgaaggccgygctggtgagaacgttggtgttctgctgcgtggtatcaaacgtgaagaaatcgaacgtggtcaggtactggctaagccgggctctatcaagccgcacaccaagttcgaatctgaagtttatatcctgtccaaagacgaaggcggccgtcacactccgttcttcaaaggctaccgtccgcagttctacttccgtacaactgacgtgactggcaccatcgaactgccggaaggcgtagagatggttatgccgggcgacaacatcaaaatggttgtta

SEQ ID NO: 101 - DNA, 830 bp, Klebsiella planticola ATCC 33531
tggcgcgatcctggttgttgctgcgactgacggcccgatgccgcagactcgtgagcacatcctgctgggtcgtcaggtaggcgttccgtacatcatcgtgttcctgaacaaatgcgacatggttgatgacgaagagctgctggaactggttgaaatggaagttcgtgagctgctgtctcagtacgacttcccgggcgacgacactccgatcgttcgtggttccgctctgaaagcgctggaaggcgaagcagactgggaagcgaaaatcatcgaactggctggctacctggattcttacatcccggaaccagagcgtgcgattgacaagccgttcctgctgcctatcgaagacgtattctccatctccggtcgtggtaccgttgttaccggtcgtgtagagcgcggtatcatcaaagtgggcgaagaagttgaaatcgttggtatcaaagatactgctaartcwacctgtacyggcgttgaaatgttccgcaaactgctggacgaaggccgtgctggtgagaacgttggtgttctgctgcgtggtatcaaacgtgaagaaatcgaacgtggtcaggtactggctaagccgggctctatcaagccgcacaccaagttcgaatctgaagtgtacattctgtccaaagacgaaggcggccgtcatactccgttcttcaaaggctaccgtccgcagttctacttccgtacaactgacgtgactggcaccatcgaactgccggaaggcgtagagatggtaatgccgggcgacaacatcaaaatggttgttaccctgattcacccratcgcgatggacgacggtctgcgtttcgcaa

SEQ ID NO: 102 - DNA, 806 bp, Klebsiella pneumoniae subsp. ozaenae ATCC 11296
cctggttgttgctgcgactgacggcccgatgccgcagactcgtgagcacatcctgctgggtcgtcaggtaggcgttccgtacatcatcgtgttcctgaacaaatgcgacatggttgatgacgaagagctgctggaactggttgagatggaagttcgtgaactgctgtctcagtacgatttcccgggcgacgacaccccgatcgttcgtggttctgctctgaaagcgctggaaggcgacgcagagtgggaagcgaaaatcatcgaactggctggccacctggatacctatatcccggaaccagagcgtgcgattgacaagccgttcctgctgccgatcgaagacgtattctccatctccggtcgtggtaccgttgttaccggtcgtgtagagcgcggtatcatcaaagtaggtgaagaagttgaaatcgttggtatcaaagaaaccgcgaaaaccacctgtactggcgttgaaatgttccgcaaactgctggacgaaggccgtgctggtgagaacgtaggtgttctgctgcgtggtatcaaacgtgaagaaatcgaacgtggtcaggtactggctaagccgggcaccatcaacccgcacaccaagttcgaatctgaagtgtacatcctgtccaaagacgaaggcggccgtcatactccgttcttcaaaggctaccgtccgcagttctacttccgtactactgacgtgactggcaccatcgaactgccggaaggcgtagagatggtaatgccgggcgacaacatcaaaatggttgttaccctgatccacccgatcgcgatggacgacg

SEQ ID NO: 103 - DNA, 743 bp, Klebsiella pneumoniae subsp. pneumoniae ATCC 13883
gcagactcgtgagcacatcctgctgggtcgtcaggtaggcgttccgtacatcatcgtgttcctgaacaaatgcgacatggttgatgacgaagagctgctggaactggttgagatggaagttcgtgaactgctgtctcagtacgatttcccgggcgacgacactccgatcgttcgtggttctgctctgaaagcgctggaaggcgacgcagagtgggaagcgaaaatcatcgaactggctggccacctggatacctatatcccggaaccagagcgtgcgattgacaagccgttcctgctgccgatcgaagacgtattctccatctccggtcgtggtaccgttgttaccggtcgtgtagagcgcggtatcatcaaagtaggtgaagaagttgaaatcgttggtatcaaagaaaccgcgaaaaccacctgtactggcgttgaaatgttccgcaaactgctggacgaaggccgtgctggtgagaacgtaggtgttctgctgcgtggtatcaaacgtgaagaaatcgaacgtggtcaggtactggctaagccgggcaccatcaacccgcacaccaagttcgaatctgaagtgtacatcctgtccaaagacgaaggcggccgtcacactccgttcttcaaaggctaccgtccgcagttctacttccgtactactgacgtgactggcaccatcgaactgccggaaggcgtagagatggtaatgccgggcgacaacatcaaaatggttgtta

SEQ ID NO: 104 - DNA, 819 bp, Klebsiella pneumoniae subsp. rhinoscleromatis ATCC 13884
tggttgttgctgcgactgacggcccgatgccgcagactcgtgagcacatcctgctgggtcgtcaggtaggcgttccgtacatcatcgtgttcctgaacaaatgcgacatggttgatgacgaagagctgctggaactggttgagatggaagttcgtgaactrctgtctcagtacgatttcccgggcgacgacaccccgatcgttcgtggttctgctctgaaagcgctggaaggcgacgcagagtgggaagcgaaaatcatcgaactggctggccacctggatacctatatcccggaaccagagcgtgcgattgacaagccgttcctgctgccgatcgaagacgtattctccatctccggtcgtggtaccgttgttaccggtcgtgtagagcgcggtatcatcaaagtaggtgaagaagttgaaatcgttggtatcaaagaaaccgcgaaaaccacctgtactggcgttgaaatgttccgcaaactgctggacgaaggccgtgctggtgagaacgtaggtgttctgctgcgtggtatcaaacgtgaagaaatcgaacgtggtcaggtactggctaagccgggcaccatcaacccgcacaccaagttcgaatctgaagtgtacatcctgtccaaagacgaaggcggccgtcacactccgttcttcaaaggctaccgtccgcagttctacttccgtactactgacgtgactggcaccatcgaactgccggaaggcgtagagatggtaatgccgggcgacaacatcaaaatggttgttaccctgatccatccgatcgcgatggacgacggtctgcgtttcgcaa

SEQ ID NO: 105 - DNA, 832 bp, Kluyvera ascorbata ATCC 33433
cggcgcgatcctggttgttgctgcgactgatggccctatgccacagactcgtgagcacatcctgctgggtcgtcaggtaggcgttccttacatcatcgtgttcctgaacaaatgygacatggttgatgacgaagagctgctggaactggttgaaatggaagttcgtgaacttctgtctcagtacgatttcccaggcgacgatactccaatcatccgtggttctgctctgaaagcgctggaaggcgatgcagagtgggaagcgaaaatcatcgaactggctggcttcctggattcttacatcccagaaccagaacgtgctatcgataagccgttcctgctgccaatcgaagacgtattctccatctccggtcgtggtaccgttgttaccggtcgtgtagagcgcggtatcatcaaagttggygaagaagttgaaatcgttggtatcaaagacaccgctaagtctacctgtaccggcgttgaaatgttccgcaaactgctggacgaaggccgtgctggtgagaacgttggtgttctgctgcgtggtatcaaacgtgaagaaatcgaacgtggtcaggttctggctaagccaggctctatcaagccgcacaccaagttcgaatctgaagtgtacattctgtccaaagacgaaggcggccgtcatactccgttcttcaaaggctaccgtccacagttctacttccgtactactgacgtgaccggtaccatcgaactgccagaaggcgttgagatggtaatgccaggcgacaacatcaagatggttgtgactctgatccacccaatcgcgatggacgacggcctgcgtttcgcaacc

SEQ ID NO: 106 - DNA, 830 bp, Kluyvera cryocrescens ATCC 33435
tggcgcgatcctggttgttgctgcaactgatggccctatgccacagactcgtgagcacatcctgctgggtcgtcaggtaggcgttccttacatcatcgtgttcctgaacaaatgtgacatggttgatgacgaagagctgctggaactggttgaaatggaagttcgtgaacttctgtctcagtacgatttcccaggcgacgacactcctatcgttcgtggttccgcgctgaaagcgctggaaggcgacgctgagtgggaagcaaaaatcatcgaactggctggcttcctggattcttacatcccagaaccagagcgtgcgattgataagccgttcctgctgccaatcgaagacgtattctccatctccggtcgtggtaccgttgttaccggtcgtgtagagcgcggtatcatcaaagttggtgaagaagttgaaatcgtgggtatcaaagacactgctaagtctacctgtaccggcgttgaaatgttccgcaaactgctggacgaaggccgtgctggtgagaacgttggtgttctgctgcgtggtatcaaacgtgaagaaatcgaacgtggtcaggttctggctaagccaggctccatcaagccgcacaccaaattcgaatctgaagtttacatcctgtccaaagacgaaggcggccgtcatactccgttcttcaaaggctaccgtccacagttctacttccgtactactgacgtgactggtaccatcgaactgccagaaggcgtagagatggtaatgccgggcgacaacatcaaaatggttgttaccctgatccacccaatcgcgatggacgacggtctgcgtttcgcaa

SEQ ID NO: 107 - DNA, 826 bp, Kluyvera georgiana ATCC 51603
cgcgatcctggttgttgctgcgactgacggcccgatgccgcagactcgtgagcacatcctgctgggtcgtcaggttggcgttccgtacatcatcgtgttcctgaacaaatgcgacatggttgatgacgaagagctgctggaactggttgaaatggaagttcgtgaacttctgtctcagtacgacttcccgggcgacgacacgccgatcgttcgtggttctgctctgaaagcgctggaaggcgacgctgagtgggaagcgaaaatcatcgaactggcgggcttcctggattcttacatcccggaaccagagcgtgcgattgacaagccgttcctgctgccgatcgaagacgtattctccatctccggtcgtggtaccgttgttaccggtcgtgtagaacgcggtatcatcaaagttggcgaagaagttgaaatcgttggtatcaaagacaccgctaagtctacctgtactggcgttgaaatgttccgcaaactgctggacgaaggccgtgctggtgagaacgttggtgttctgctgcgtggtatcaaacgtgaagaaatcgaacgtggtcaggtactggctaagccgggttctatcaagccgcacaccaagttcgaatctgaagtgtacattctgtccaaagacgaaggcggccgtcatactccgttcttcaaaggctaccgtccgcagttctacttccgtactactgacgtgactggcaccatcgaactgccggaaggcgttgagatggtaatgccgggcgacaacatcaaaatggttgttaccctgatccacccgatcgcgaaggacgaaggtctgcgtttcgca

SEQ ID NO: 108 - DNA, 803 bp, Lactobacillus casei subsp. casei ATCC 393
  misc_feature (1)...(803): n=a,t,c or g
gctgctgatggcccaatgccacaaactcgtgaacatatcttactttcacgtcaagttggtgttccatacatcgttgtattcatgaacaaatgtgacatggttgacgatgaagaattactagaattagttgaaatggaaattcgtgatctattaactgaatatgaattccctggcgatgacattcctgtaatcaaaggttcagctcttaaagcacttcaaggtgaagctgactgggaagctaaaattgacgagttaatggaagctgtagattcttacattccaactccagaacgtgatactgacaaaccattcatgatgccagttgaggatgtattctcaatcactggtcgtggaacagttgcaactggacgtgttgaacgtggacaagttaaagttggtgacgaagtagaagttatcggtattgaagaagagagcaaaaaagtagtagtaactggagtagaaatgttccgtaaatyactagattacgctgaagctggcgacaacattggcgcacttctacgtggtgttgctcgtgaagatatccaacgtggtcaagtattagctaaaccaggttcgattactccacacactaacttcaaagctgaaacttatgttttaactaaagaagaaggtggacgtcacactccattcttcaacaactaccgcccacaattctatttccgtactactgacgtaactggtattgttacacttccagaaggtactgaaatggtaatgcctggtgataacattgagcttgcagttganctaattgcaccaatcgctatcgaagacggtactaa

SEQ ID NO: 109 - DNA, 825 bp, Lactococcus lactis subsp. lactis ATCC 19435
cggtgcaatcctcgttgttgctgcaactgatggaccaatgccacaaactcgtgaacacatcttgctttcacgtcaagttggtgttaaataccttatcgtcttccttaacaaggctgaccttgttgatgatgaagaattgatggaactcgttgaaatggaagttcgtgacctcttgagcgaatacgacttcccaggtgacgatattcctgtaatcgctggttcagcacttggtgctttgaacggtgaaccacaatgggttgctaaagttgaagaattgatggacatcgttgatgaatacatcccaactccagaacgcgacactgacaaaccactccttcttccagtcgaagacgtattctctatcactggtcgtggtacagttgcttcaggacgtatcgaacgtggtactgttaaagttggtgacgaagttgaaatcgttggtatcaaagaagaaactaaaaaagctgttgttactggtatcgaaatgttccgtaaaacacttactgaaggtcttgctggtgataacgtcggtgcacttctccgtggtatccaacgtgacgaaatcgaacgtggtcaagttattgctaaaccaggttcaatcactccacacaaacttttcgaaggtgaagtttacgtattgagcaaagaagaaggcggacgtcacactccattcttcgacaactaccgtcctcaattctacttccacacaactgacgttactggttcagttaaacttccagaaggaactgaaatggtaatgcctggtgacaacgtgcatatcgacgttgaattgatccacccagttgcgatcgaacaaggtactac

SEQ ID NO: 110 - DNA, 824 bp, Leclercia adecarboxylata ATCC 23216
ggcgcgatcctggttgttgctgcgactgacggcccaatgcctcagacccgtgagcacatcctgctgggtcgtcaggtaggcgttcctttcatcatcgtgttcctgaacaaatgcgacatggttgatgacgaagagctgctggaactggttgagatggaagttcgtgaactyctgtcccagtacgacttcccgggcgacgacaccccaatcgttcgtggttctgcgctgaaagcgctggaaggcgaagcagagtgggaagagaaaatcatcgarctggctggctacctggattcctacatcccagagccagagcgtgcgattgacaagccgttcctgctgcctatcgaagacgtattctccatctccggtcgtggtaccgttgttaccggtcgtgtagagcgcggtatcatcaargttggcgaagaagttgaaatcgttggtatcaaggacactgctaagtctacctgtaccggcgttgaaatgttccgcaaactgctggacgaaggccgtgccggtgagaacgttggtgttctgctgcgtggtatcaaacgtgaagaaatcgaacgtggtcaggttctggctaagccaggctcyatcaagccgcacaccaagttcgaatctgaagtgtacatcctgtcyaaagacgaaggcggccgtcatactccgttcttcaaaggctaccgtccacagttctacttccgtackactgacgtgaccggtaccatcgarctgccagaaggcgttgagatggtaatgccaggcgacaacatcaaaatggttgttaccctgatccacccaatcgcaatggacgatggtctgcgttc

SEQ ID NO: 111 - DNA, 838 bp, Legionella micdadei ATCC 33218
cggagcgatattagtagtatcagcagcggatggcccaatgcctcaaacgagagagcacatactyttatcccgscaggtaggtgttccctatatagtagtgttcttaaacaaagctgacatggtggatgatgcggagttattagaattagttgaaatggaagtacgcgayttgttgagcagctatgaatttccaggagatgagatcccgattgtagttggttcagcattaaaagcattggaaggcgatacgagtgatataggtgtaccagcgattgagaagttagttgagacgatggattcttatatacctgagccggtaagaaacatcgataaaagtttcttgttaccgatcgaagacgtgttctcaatatctggacgaggaacagtagtaacaggacgtatcgaaagcgggatcatcaaagttggtgaggaagtcgagattgttggtatacgtgacactcaaaagacgacatgcacaggcgttgaaatgttccgtaaattacttgacgaaggtcgagctggagacaacgttggtatattgctacgtggtacgaagcgggatgaagttgaacgcggacaagtattagctaagccgggaagcattaaaccgcatactaaatttgaagctgaagtgtatgtgttgtcaaaagatgaaggtggacgtcataccccattctttaacggatatcggcctcaattttacttcaggaccacagacgtaactggttcttgtgatttacctgarggtatagaaatggtaatgccaggtgataacgtcaagctgattgttagcttacactcaccgattgctatggacgaaggtttgcgttttgcaatc

SEQ ID NO: 112 - DNA, 838 bp, Legionella pneumophila subsp. pneumophila ATCC 33152
cggagcgatactggttgtatcagcagctgatggtcctatgccacaaacgagggaacacattctattgtctcgccaggtaggtgttccatatattgttgtgttcatgaacaaagcggatatggttgatgaccctgagttattagagttagtggaaatggaagtgcgagatttattaagcagttacgatttcccaggggatgacatacctattgttgttggttcagctttgaaagcattggaaggtgaagacagtgatataggcgttaaggctattgagaaattggttgaaacaatggattcatacattcctgagccagttagaaacatagacaagccatttttgttgccgattgaagacgtattttcaatttctggacgcggaacagtggtaactggtcgtgtagagagtggaattgttaaagttggtgaggaagttgaaattgttggaataagagacacccaaaagacgacttgtacgggtgttgagatgttccgtaaattacttgatgaaggtcgagctggtgataacgttggtgtgttattacgaggtacgaagcgagatgaagtggagcgtggacaggtattggcgaagccaggaaccatcaagccacacaccaagtttgaagcagaagtgtatgtattatccaaggaagaaggcggacgtcacactccattctttaatggataccgtccacaattctatttcagaaccactgacgtgacaggtacttgtgacttgccatcaggagttgaaatggtaatgcctggagataatgtgcaattagttgttagcttgcatgctccgattgcgatggatgaaggtttaagattcgcaatt

SEQ ID NO: 113 - DNA, 828 bp, Leminorella grimontii ATCC 33999
gtgcaatcctggtagtagcagcgactgacggcccgatgcctcagactcgcgagcacatcctgctgggtcgtcaggtaggcgttccgtacatcatcgtattcctgaacaagtgcgatatggttgatgacgaagagctgctggagctggttgaratggaagttcgcgaactgctgtctcagtacgacttcccgggcgacgacactccggtagtccgcggttcagcgctgaaagcgctggaaggcgaagccgagtgggaarcgaaaatcatcgagctggcaggccmtctggatacttatatcccagaacctgagcgtgcgattgacaagccgttcctgctgcckatcgaagacgtattctctatctccggccgtggtaccgttgttaccggtcgtgtagagcgcggcatcatcaaagtcggtgaagaagtggaaatcgtcggtatcaaagataccaccaagaccacctgtaccggcgttgaaatgttccgtaagctgctggacgaaggccgtgcgggcgagaacgtgggcgttctgctgcgcggtaccaagcgtgacgaaatcgaacgtggtcaagttctggccaagccgggcaccatcactcctcacacccagttcgtgtcagaagtgtatatcctgagcaaggatgaaggcggccgtcatactccgttcttcaaaggctaccgtcctcagttctacttccgtacgactgacgtgacaggcaccatcgaactgccggaaggcgtagagatggtaatgccaggcgacaacattcagatgaccgtaagtctgattgcgccgatcgcaatggacgaaggtctgcgcttcgcaa

SEQ ID NO: 114 - DNA, 826 bp, Leminorella richardii ATCC 33998
gctatcctggttgttgctgcgactgacggcccaatgcctcagactcgtgagcacatcctgctgggtcgccaggtaggcgttccttacatcatcgtgttcctgaacaagtgcgacatggttgatgacgaagagctgctggaactggtagaaatggaagttcgtgaacttctgtctcaatacgacttcccgggcgacgatacgccggttgttcgcggttcagcgctgaaagcgctggaaggtgacgcygagtgggaarcgaaaatcattgaactggcggaatccttrgatacttayattccagagccagagcgtgcgattgacaagccgttcctgctgcctatcgaagacgttttctctatctctggccgtggtactgtagtcaccggtcgtgtagagcgcggcatcatcaaagttggtgaagaagtggaaatcgtgggaatcaaagacaccaccaagaccacctgtactggcgttgaaatgttccgtaagctgctggacgaaggccgtgcaggtgagaacgttggtgttctgctgcgyggtactaagcgtgacgaaatcgaacgtggtcaggtactggctaagccaggcaccatcactcctcacacagaattcgtgtcagaagtgtatatcctgagcaaggatgaaggcggycgtcatactccgttcttcaaaggctaccgtcctcagttctacttccgtacgactgacgtgaccggcaccatcgaactgccagaaggcgtagagatggtaatgccaggcgataacatccagatggtagttacgctgattgccccaatcgcgatggacgaaggtctgcgcttcgcaa

SEQ ID NO: 115 - DNA, 843 bp, Leptospira interrogans ATCC 23581
tgcggcgattcttgtagtatccgcaactgacggacctatgccacaaacaaaagaacatatccttcttgctcgtcaggtaggtgttccatatgtaattgtattcattaacaaagcagatatgcttgctgctgacgaaagagcagaaatgatcgaaatggttgagatggacgttcgtgaacttctcaataagtatagcttcccaggagatacaactcctatcgttcatggttctgcggtaaaagcacttgagggcgatgaatctgaaattgggatgcctgcaattctcaaattgatggaagctctggatactttcgttccaaatccaaaacgtgtaatcgacaaacctttccttatgccagtagaagacgttttctcgatcactggtcgtggaactgttgcaactggaagagtggaacaaggtgttttgaaagtgaacgacgaagttgaaattatcggtatccgcccaacaacaaaaactgttgttaccggtatcgaaatgttcagaaaacttctcgatcaagcggaagctggcgacaacatcggcgctcttcttcgtggaactaaaaaagaagaaatcgaaagagggcaagttcttgcgaagccaggttctatcactcctcacaaaaagtttgccgctgaggtgtatgtattaactaaggatgaaggcggacgtcatactccgtttatcaataactaccgtcctcagttttactttagaacaactgacgtaaccggagtttgtaaccttcctaatggtgtcgaaatggttatgcctggtgataacgtttctttgacggttgaattgattagcccgatcgcaatggacaagggtcttaagttcgc

SEQ ID NO: 116 - DNA, 832 bp, Megamonas hypermegale ATCC 25560
cggtgctatcctcgttgttagtgctgctgatggtcctatgcctcagactcgtgaacacatccttctcgctcgtcaggttggtgttccagctatcgttgtattcctcaacaaagctgaccaggttgatgaccctgaacttctcgaacttgttgaaatggaagttcgtgaacttctttccagctatgacttcccaggcgatgacgttccagtaatcactggttccgctcttcaggctctcgaaggcgacgaagaagctaaaaagaaaattcttgaattaatggatgctgttgatgattacatcccaactccaacacgtgacactgataaacctttcttaatgccagttgaagacgtattcacaattactggtcgtggtactgttgctacaggccgtgttgaacgtggcgaacttaaacttggtgacagcgttgaaatcgttggtctttccgatgaaaagaaatccactactgtaactggtatcgaaatgttccgcaaaatgcttgatagcgctgttgctggtgataacatcggtgcacttcttcgtggtattgaccgtaaagaaatcgaacgtggtcaagttcttgctaaacctggcacaattcatccacacaaaaaattcaaagctcaggtttacgtattaactaaagaagaaggtggacgtcatactccattcttctccaactatcgtccacagttctatttccgtactactgacgttactggtgttgtaactcttccagaaggtactgaaatggttatgcctggcgataacattgaaatgagcatcgaactcatcactccaatcgctattgaaaaaggtcttcgcttcgct

SEQ ID NO: 117 - DNA, 820 bp, Mitsuokella multacida ATCC 27723
tggtgctatcctcgtcgtttccgctgctgatggcccgatgccgcagacgcgtgagcacatcctgctcgctcgccaggtcggtgttccggcaatcgttgtcttcctcaacaaggttgaccaggttgacgatccggagctcctcgagctcgtcgagatggaagttcgcgagctgctctccagctacgacttcccgggcgatgacatccctgtaatcgctggttccgctctgaaggccctcgaaggcgacgaagagcagaagaagaacatcctcaagctcatggaagctgtcgatgagtacatcccgacgccggtccgcgacaacgctaagccgttcctgatgccggtcgaggatgtcttcacgatcacgggccgtggtacggttgcaacgggccgcgttgagcgtggtgagctcaagatgaacgatacggttgagatcgttggtctgcaggacgagccgcgtcagacggttgtcacgggcatcgagatgttccgcaagatgcttgatttcgctgaggctggcgataacatcggtgctctgctccgtggtatcgaccgcaaggagatcgagcgtggccaggttctcgcaaagccgggcacgattcatccgcacacgaagttcaaggctcaggtctatgtcctgacgaaagaagaaggcggccgtcatacgccgttcttcacgaactatcgcccgcagttctacttccgcacgacggacgtaactggcgtagtcaaactgccggaaggcacggagatggttatgcctggcgataacgtcgagatggaagttgagctcatcaccccgatcgctatcgagaagggc

SEQ ID NO: 118 - DNA, 831 bp, Mobiluncus curtisii subsp. holmesii ATCC 35242
cggcgctatcctcgtggtggctgctactgacggtccgatggctcagaccaaggaacacatcctgttggctaagcaggttggcgtgccctccatcctggtcgctctgaacaagtgcgattcttccgatgtggacgaagacatgctcgaaatcgtcgaggacgaaatccgcgatgacctggagaagcagggcttcgatcgtgactgcccgattatccacgtttccgctctgaaggccctggaaggcgaccccgagtggaccaagaagattgaagagctcatggaagcggtcgatacctacattcctgagcctgttcgtgacctcgacaagccgttcttgatgcctatcgaagacgtcttcaccattactggtcgcggtaccgtagtgaccggtcgtgtggaacgcggcaagctaccgttgaacgccgaagtggaaatcgtaggtattcgtcctacgcaaaagaccaccgttaccggtatcgaaatgttccacaagtccatggacgaagcctacgccggcgagaactgtggtctgttgctgcgtggcaccaagcgtgaggacgttgagcgcggtcaggttgtctgcattcctggctccgtgaccccgcacaccaagttcgagggcaaggtctacatcttgaagaaggacgaaggtggacgtcacaagtcgttctacgacggctaccgcccgcagttcttcttccgcaccaccgacgtgaccggtgttattcacctgcccgaaggcaccgaaatggttatgcctggcgacaccaccgaaattagcgttgagctgattcagcctatcgctatggaggaaggtctcggcttcgctat

SEQ ID NO: 119 - DNA, 825 bp, Moellerella wisconsensis ATCC 35017
ggtgcaattctggttgttgctgcaactgatggccctatgccacagactcgtgagcacatcctgttaggtcgtcaggttggcgttccatacatcatcgttttcctgaacaaatgtgacatggtagacgacgaagagctgttagaactggttgaaatggaagtccgtgagctgctgtctcagtacgatttcccaggcgatgacactccagtaatccgtggttcagcgctgaaagctctggaaggcgaagctgagtgggaagctaaaatcattgaactggcagaagcactggattcttatatcccagagccagagcgtgacattgataagccattcctgttaccaatcgaagacgtattctcaatttcaggccgtggtacagttgttactggtcgtgttgagcgtggtatcgttaaagtcggtgaagaagttgaaatcgttggtatcaaagataccgtgaaaacaacatgtactggcgttgaaatgttccgtaaactgctggacgaaggccgtgctggtgagaacgttggtgttctgctgcgtggtactaaacgtgatgatatcgaacgtggtcaagtattggctaaaccaggttcaatcactccgcatacaactttcgaatcagaagtttacatcctgagcaaagatgaaggtggccgtcatactccattcttcaaaggttaccgtccacagttctacttccgtacaactgacgtaaccggtactatcgaactgccagaaggcgttgagatggtaatgccaggtgataacatcaaaatgatcgttactctgatccacccaattgcaatggatgcaggtctgcgtttt

SEQ ID NO: 120 - DNA, 827 bp, Branhamella catarrhalis ATCC 43628
tggtgctatcttggttgtttctgcaactgatggtcctatgccacaaactcgtgagcatatcctactatctcgtcaggttggtgtaccatacatcatggtattcatgaacaagtgcgatatggttgatgatgaagagctactagaattggttgaaatggaagttcgtgaacttctatctgactatgatttccctggtgatgataccccaatcatcaaaggttcagcactagaagcattgaatggttctgatggtaaatatggcgagcctgcagttctagaactgctagacacactagacagctatatcccagagcctgagcgtgatatcgataagtcattcttgatgccaattgaagatgtcttctcgatctcaggtcgtggtacagttgtgactggtcgtgttgaatcaggtattattaaagttggtgatgaaattgaaatcatcggtatcaaaccaactgctaaaaccacctgtactggtgttgaaatgttccgtaaactgttagacgaaggtcgtgcaggtgagaactgtggtatcttgttgcgtggtactaagcgtgaagaagttcaacgcggtcaagtacttgcaaaaccaggttcaatcaccccacatactaagtttgatgctgaagtttatgtactgtcaaaagaagaaggtggtcgtcacaccccattcttaaatggctatcgcccacagttctacttccgtaccacagatgtgactggtgccatcactctacaagaaggtaccgaaatggttatgcctggtgacaatgttgagatgagtgttgagcttatccacccaatcgccaggataaaggtctacg

SEQ ID NO: 121 - DNA, 806 bp, Morganella morganii subsp. morganii ATCC 25830
cggcgctatcctggttgttgctgcaactgatggccctatgccacagacccgtgagcacatcctgttaggtcgtcaggttggcgttccttacatcatcgtattcctgaacaaatgtgacatggttgatgatgaagagctgctggaactggttgaaatggaagttcgtgaacttctgtctcagtacgatttccctggcgacgacacgccaatcgttcgcggttcagcgctgaaagcactggaaggcgagccagagtgggaagctaaratcgttgaactggcaggtttcctggattcttacatccctgagccagagcgtgcaattgacaagccgttcctgctgccaatcgaagacgtattctcaatctccggccgtggtaccgttgttaccggtcgtgttgagcgcggtatcatcaaggttggtgaggaagttgaaatcgtgggtatcaaagatactgcgaaaaccacctgtaccggtgttgaaatgttccgcaaactgctggacgaaggccgtgcmggtgagaacgtcggtgttctgctgcgtggtaccaagcgtgaagaaatcgaacgtggtcaggttctggctaaaccaggttcaatcaaaccacayaccaaatttgaatcagaagtttatattctgagcaaagatgaaggtggtcgtcatactccattcttcaaaggytaccgtccacagttctacttccgtaccacagacgtaacaggtactatcgaactgccggaaggcgttgaaatggtaatgccgggcgacaacatcaaaatgatcgtcaccctgatccacccaatcgcaa

SEQ ID NO: 122 - DNA, 825 bp, Mycobacterium tuberculosis strain TB 299
ggtgcgatcctggtggtcgccgccaccgacggcccgatgccccagacccgcgagcacgttctgctggcgcgtcaagtgggtgtgccctacatcctggtagcgctgaacaaggccgacgcagtggacgacgaggagctgctcgaactcgtcgagatggaggtccgcgagctgctggctgcccaggaattcgacgaggacgccccggttgtgcgggtctcggcgctcaaggcgctcgagggtgacgcgaagtgggttgcctctgtcgaggaactgatgaacgcggtcgacgagtcgattccggacccggtccgcgagaccgacaagccgttcctgatgccggtcgaggacgtcttcaccattaccggccgcggaaccgtggtcaccggacgtgtggagcgcggcgtgatcaacgtgaacgaggaagttgagatcgtcggcattcgcccatcgaccaccaagaccaccgtcaccggtgtggagatgttccgcaagctgctcgaccagggccaggcgggcgacaacgttggtttgctgctgcggggcgtcaagcgcgaggacgtcgagcgtggccaggttgtcaccaagcccggcaccaccacgccgcacaccgagttcgaaggccaggtctacatcctgtccaaggacgagggcggccggcacacgccgttcttcaacaactaccgtccgcagttctacttccgcaccaccgacgtgaccggtgtggtgacactgccggagggcaccgagatggtgatgcccggtgacaacaccaacatctcggtgaagttgatccagcccgtcgccatggacgaaggtctgcgtttc

SEQ ID NO: 123 - DNA, 806 bp, Neisseria cinerea ATCC 14685
cggtgcgatcttggtatgttccgcagctgacggtcctatgccgcaaactcgcgaacacatcctgttggcccgccaagtaggtgtaccttacatcatcgtgttcatgaacaaatgcgacatggttgacgatgccgagctgttggagctggttgaaatggaaatccgtgacttgctgtcaagctacgacttcccaggtgacgactgcccgatcgtacaaggttctgcactgaaagccttggaaggcgacgcagcttacgaagaaaaaatcttcgaattggctgctgcattggacagctacatcccaacacctgagcgtgcagtggacaaacctttcttgttgcctatcgaagacgtattctctatttccggtcgcggtacagtagtaaccggtcgtgtagagcgcggtatcatccacgttggtgacgagatcgaaatcgtaggtctgaaagaaactcaaaaaaccacttgtaccggtgttgaaatgttccgcaaactgctggacgaaggtcaagctggtgacaacgtaggtgtattgctgcgtggtactaaacgtgaagacgtagagcgtggtcaagtattggctaaaccgggtactatcactcctcacaccaagttcaaagcagaagtatacgtactgagcaaagaagagggtggtcgtcacactccgttcttcgctaactaccgtccacaattctacttccgtactaccgacgtaaccggcgcggttactttggaagaaggtgtagaaatggtaatgccgggtgagaacgtaaccattactgtagaactgattgcgcctatcgcta

SEQ ID NO: 124 - DNA, 822 bp, Neisseria elongata subsp. elongata ATCC 25295
cggcgcaatcttggtatgttccgctgcygacggtcctatgccgcaaactcgcgaacacatcctgttggcccgccaagtaggcgtaccttacatcatcgtgttcatgaataaatgcgacatggttgaygatgccgaactgctggaactggttgaaatggaaatccgtgacttgctgtcaagctacgacttcccaggcgacgactgcccgatcgtacaaggttccgcactgaaagccttggaaggcgacgcagcttacgaagaaaaaatcttcgaactggctgctgcattggacagctacatcccgacacctgagcgtgccgtggacaaaccgttcctgttgcctatcgaagacgtattctctatctccggccgtggtacagtagtaaccggtcgtgtagagcgcggtatcatccacgtcggtgacgagatcgaaatcgtaggtctgaaagaaacccaaaaaaccacttgtaccggtgttgaaatgttccgcaaactgctggacgaaggtcaagcaggtgacaacgtaggcgtattgctgcgcggtaccaaacgtgaagaagtggaacgcggtcaagtattggctaaaccgggtaccatcactcctcacaccaaattcaaagcagaagtttacgtattgagcaaagaagagggtggtcgtcatactccgttcttcgctaactaccgtccacaattctacttccgtactaccgacgtaaccggtgcggttactttggaagaaggtgtagaaatggttatgcctggtgagaacgtggccatcactgtagaactgattgcacctatcgctatggaagaaggtctgcg

SEQ ID NO: 125 - DNA, 820 bp, Neisseria flavescens ATCC 13120
cggcgcgacttggtatgttccgcagctgacggtcctatgccgcaaacccgcgaacacatcctgttggctcgccaagtaggtgtaccttacatcatcgtattcatgaacaaatgcgacatggtagacgatgccgagctgttggaactggttgaaatggaaattcgtgacttgttgtcaagctacgacttcccaggcgacgactgcccaatcgtacaaggttctgcactgaaagctttggaaggtgatgctgcttacgaagaaaaaatcttcgaattggctgctgccttggacagctacatcccaacacctgagcgtgctgtggacaaacctttcttgttgcctatcgaagacgtattctctatctctggtcgtggtacagtagtaaccggtcgcgtagagcgcggtatcatccacgttggtgacgagatcgaaatcgtaggtctgaaagaaactcaaaaaaccacttgtaccggcgttgaaatgttccgcaaactgctggacgaaggtcaagcaggtgacaacgtaggcgtattgctgcgtggtactaaacgtgaagacgtagagcgtggtcaagtattggctaaaccaggtaccatcactcctcacaccaaattcaaagcagaagtatacgtactgagcaaagaagagggtggtcgtcacactccatttttcgctaactaccgtccacaattctacttccgtactaccgacgtaactggtgcagttactttggaagaaggcgtagaaatggtaatgccaggtgagaacgtaaccattactgtagaactgattgcgccaatcgctatggaagaagtctgcg

SEQ ID NO: 126 - DNA, 830 bp, Neisseria gonorrhoeae ATCC 49226
ggtgcaatcctggtatgttctgctgccgacggccctatgccgcaaacccgcgaacacatcctgctggcccgtcaagtaggcgtaccttacatcatcgtgttcatgaacaaatgcgacatggtcgacgatgccgagctgttggaactggttgaaatggaaatccgcgacctgctgtccagctacgacttccccggcgacgactgcccgatcgtacaaggttccgcactgaaagccttggaaggcgatgccgcttacgaagaaaaaatcttcgaactggctaccgcattggacagctacatcccgactcccgagcgtgccgtggacaaaccattcctgctgcctatcgaagacgtgttctccatttccggccgcggtaccgtagtcaccggccgtgtagagcgaggtatcatccacgttggtgacgagattgaaatcgtcggtctgaaagaaacccaaaaaaccacctgtaccggcgttgaaatgttccgcaaactgctggacgaaggtcaggcgggcgacaacgtaggcgtattgctgcgcggtaccaaacgtgaagacgtagaacgcggtcaggtattggccaaaccgggtactatcactcctcacaccaagttcaaagcagaagtgtacgtattgagcaaagaagagggcggccgccataccccgtttttcgccaactaccgtccccaattctacttccgtaccactgacgtaaccggcgcggttactttggaaaaaggtgtggaaatggtaatgccgggtgagaacgtaaccattactgtagaactgattgcgcctatcgctatggaagaaggtctgcgctttgcgat

SEQ ID NO: 127 - DNA, 816 bp, Neisseria lactamica ATCC 23970
cggcgcaatcttggtatgttccgccgccgacggccctatgccgcaaacccgcgaacacattctgttggcccgccaagtaggtgtaccttacatcatcgtattcatgaacaaatgcgatatggtcgacgatgccgagctgttggaactggttgaaatggaaatccgcgacctgctgtcaagctacgacttcccaggcgacgactgcccaatcgtacaaggttccgcactgaaagctttggaaggcgatgccgcttacgaagaaaaaatcttcgaactggctgccgcattggacagctacatcccgactcccgagcgtgccgtggacaaaccgttcctgctgcctatcgaagacgtattctccatctccggccgcggtacggtagtaaccggccgtgtagagcgcggtgtcatccacgttggcgacgagatcgaaatcgtcggtctgaaagaaacccaaaaaaccacctgtaccggtgtcgagatgttccgcaaactgctggacgaaggtcaggcaggcgacaacgtaggcgtattgctgcgcggtaccaaacgtgaagaagtggaacgcggtcaggtattagccaaaccgggtaccatcactccgcacaccaagttcaaagcagaagtgtatgtattgagcaaagaagagggcggtcgtcacactccgttcttcgccaactaccgtccgcaattctacttccgtaccaccgacgtaaccggcgcggttactttggaagaaggcgtggaaatggtaatgcccggtgagaacgtaaccattactgtagaactgattgcgcctatcgctatggaagaagg

SEQ ID NO: 128 - DNA, 831 bp, Neisseria meningitidis ATCC 13077
cggtgcaatcctggtatgttccgcagccgacggtcctatgccgcaaacccgcgaacacatcctgctggcccgtcaagtaggcgtaccttacatcatcgtgttcatgaacaaatgcgacatggtcgacgatgccgagctgttggaactggttgaaatggaaatccgcgacctgctgtccagctacgacttccccggcgacgactgcccgatcgtacaaggttccgcactgaaagccttggaaggcgatgccgcttacgaagaaaaaatcttcgaattggctgctgcattggacagctacatcccgactcccgagcgtgccgtggacaaacctttcttgttgcctatcgaagacgtattctctatttccggtcgtggtacagtagtaaccggtcgtgtagagcgcggtatcatccacgtcggtgacgagatcgaaatcgtcggtctgaaagaaactcaaaaaaccacttgtaccggtgttgaaatgttccgcaaactgctggacgaaggtcaagcaggcgacaacgtaggcgtattgctgcgcggtaccaaacgtgaagacgtagagcgtggtcaagtattggctaaaccgggtacaatcactcctcacaccaagttcaaagcagaagtatacgtactgagcaaagaagagggcggccgccataccccgttcttcgccaactaccgtccccaattctacttccgtaccaccgacgtaaccggcgcggttactttggaagaaggtgtggaaatggtaatgccgggcgagaacgtaaccatcaccgtagaactgattgcgcctatcgctatggaagaaggtttgcgctttgcgat

SEQ ID NO: 129 - DNA, 815 bp, Neisseria mucosa ATCC 19696
cggcgcaatcttggtatgttctgctgcygacggtcctatgccgcaaacccgygaacacatcctgttggcccgtcaagtaggygtaccttacatcatcgtgttcatgaacaaatgcgacatggttgacgatgccgaaytgttggaactggttgaaatggaaatccgtgacttgctgtcaagctacgacttccctggygacgactgcccgattgtacaaggttctgcactgaaagccttggaaggcgatgccgcttacgaagaaaaaatcttcgaactggctgccgcattggacagctacatcccgactcccgagcgtgccgtagacaaaccgttcctgttgcctatcgaagacgtattctccatctccggtcgtggtacagtagtaaccggccgtgtagagcgcggtgttatccacgttggtgacgagatcgaaatcgtaggtctgaaagaaacccaaaaaaccacatgtaccggtgttgaaatgttccgcaaactgctggacgaaggtcaagccggtgacaacgtaggcgtattgctgcgcggtaccaaacgtgaagaagtggaacgcggtcaagtattggctaaaccgggtaccatcactccgcacaccaaattcaaagcagaagtgtacgtattgagcaaagaagagggtggtcgtcatactccgttcttcgctaactaccgtcctcaattctacttccgtactaccgacgtaaccggtgcggttactttggaagaaggtgtagaaatggttatgcctggtgagaaygtagccatyactgtagaactgattgcgcctatygctatggaagaag

SEQ ID NO: 130 - DNA, 829 bp, Neisseria sicca ATCC 9913
ggcgcaatcttggtatgttccgctgctgacggtcctatgccgcaaacccgcgaacacatcctgttggcccgccaagtaggcgtaccttacatcatcgtgttcatgaacaaatgcgacatggttgacgatgccgagctgttggaactggttgaaatggaaatccgtgacttgctgtcaagctacgacttccctggtgacgactgcccgatcgtacaaggttctgcactgaaagccttggaaggcgacgccgcttacgaagaaaaaatcttcgaactggctgctgcattggacagctacatcccgactcctgagcgtgccgtggacaaaccgttcctgttgcctattgaagacgtattctccatctccggtcgcggtaccgtagtaaccggccgtgtagagcgcggtgttatccacgttggtgacgagattgaaatcgtaggtctgaaagaaacccaaaaaaccacttgtaccggtgttgaaatgttccgcaaactgctggacgaaggtcaagccggtgacaacgtaggcgtattgctgcgcggtaccaaacgtgaagaagtggaacgcggtcaagtattggctaaaccgggtaccatcactcctcacactaaattcaaagcagaagtttacgtattgagtaaagaagagggtggtcgtcatactccgttcttcgctaactaccgtcctcaattctacttccgtactaccgacgtaaccggcgcggttactttggaagaaggtgtagaaatggttatgcctggtgagaacgtagccatcactgtagaactgattgcaccgatcgctatggaagaaggtctgcgctttgcga

SEQ ID NO: 131 - DNA, 814 bp, Neisseria subflava ATCC 14221
cggcgcgacttggtatgttccgcagctgatggtcctatgcctcaaactcgcgaacacatcctgttggctcgccaagtaggtgtaccttacatcatcgtattcatgaacaaatgcgacatggttgacgatgccgagctgttggaactggttgaaatggaaatccgtgacctgttgtcaagctacgacttcccaggcgacgactgcccaatcgtacaaggttctgcactgaaagctttggaaggtgacgctggttacgaagagaaaatcttcgaattggctgctgctctggacagctacatcccaacacctgagcgtgctgtggacaaacctttcttgttgcctatcgaagacgtattctctatctctggccgtggtacagtagtaactggtcgtgtagagcgcggtatcatccacgttggtgacgagatcgaaatcgtaggtctgaaagaaacccaaaaaaccacttgtaccggcgttgaaatgttccgcaaactgctggacgaaggtcaagctggtgacaacgtaggcgtattgctgcgtggtaccaaacgtgaagacgtagagcgtggtcaagtattggctaaaccaggtaccattactcctcacaccaaattcaaagcagaagtatacgtactgagcaaagaagagggtggtcgtcacactccattcttcgctaactaccgtccacaattctacttccgtactactgacgtaactggtgcagttactttggaagaaggcgtagaaatggtaatgccaggtgagaacgtaaccattactgtagaactgattgcgcctatcgctatggaagaag

SEQ ID NO: 132 - DNA, 818 bp, Neisseria weaveri ATCC 51223
gccatcttggtatgttctgctgctgacggtcctatgccgcaaacccgtgagcacatcctgttggctcgtcaagtaggtgtaccctacatcatcgtattcatgaacaaatgcgatatggttgatgatgcagagctgctggaattggtagaaatggaaatccgtgatctgctgagcagctacgatttccctggcgatgattgyccaatcgtgcaaggttctgctttgaaagctttggaaggtgatgccgcttacgaagaaaaaatctttgaattagctgctgcattggatagctatattccaacwcctgagcgygctgttgataaaccattcctgttgccgattgaagatgtattctcaatttcaggtcgtggtacagtagtaactggtcgtgtagagcgcggtattattcacgtaggcgatgaaattgaaattgtaggtttgaaagaracycaaaaaactacttgtaccggcgttgaaatgttccgtaaattgctggatsaaggtcaggctggtgataacgtaggcgtattgttgcgtggtaccaaacgtgaagacgttgagcgtggtcaagtattggctaagcctggtwctattactccgcayaccaaattcaaagcagargtktatgtwttgagyaaggaagaaggcggtcgtcatactccgttcttcgctaactatcgtccgcaattctatttccgtactacagacgttaccggtgckgtractttagaagaaggtgtggaaatggtaatgcctggtgagaaygttgccattactgtwgarytgatygctccgattgckatggaagaaggytgcgt

SEQ ID NO: 133 - DNA, 836 bp, Ochrobactrum anthropi ATCC 49188
cggcgcaattctggttgtttcggccgctgacggcccgatgccgcagacccgtgagcacatcctgctcgctcgtcaggttggcgttccggcaatcgtcgtgttcctgaacaagtgcgaccaggttgacgatgcagaactgctcgaactggttgaactggaagttcgcgaacttctgtcgaaatacgatttcccgggcgacgaagttccgatcatcaagggctcggctcttgctgctctggaagattcttcgaaggaactgggcgaagacgccgttcgttcgctgatggccgctgttgacgactacattccgaccccggaacgtccgatcgaccagccgttcctgatgccgatcgaagacgttttctcgatctcgggccgtggtacggttgtgacgggtcgcgttgagcgcggtatcgtcaaggttggtgaagaagttgaaatcgtcggcatcaaggcgacggcgaagacgacggtaaccggcgttgaaatgttccgcaagctgctcgaycagggccaggctggcgacaacatcggcgctctgatccgcggcgttggccgtgaagacgttgaacgcggccaggttctctgcaagccgggttctgtgaagccgcacaccaagttcaaggcagaagcctacattctgaccaaggacgaaggtggccgtcatacgccgttctttacgaactaccgtccgcagttctacttccgcacgacggacgtgaccggtgttgtcacgctgccggaaggcacggaaatggttatgcctggcgacaacgtcgctatggacgtcaccctgatcgtgccgatcgccatggaagagaagctccgcttcgcta

SEQ ID NO: 134 - DNA, 805 bp, Pantoea agglomerans ATCC 27155
cctggttgttgctgcgactgatggcccaatgccacagacccgtgagcacatcctgctgggtcgtcaggttggcgttccttacatcatcgtgttcctgaacaagtgtgacatggttgatgatgaagagctgctggaactggtagagatggaagtacgtgacctgctgtcacagtacgacttcccaggcgatgacaccccgatcgttcgtggttctgctctgaaagcgctggaaggcgttcctgagtgggaagcaaaaatcgttgagctggctgaacacctggacaactacatcccggatccagtccgtgcgatcgacatgccgttcctgctgccaatcgaagacgtattctcaatctctggccgtggtaccgttgttaccggtcgtgttgagcgcggcatcgttaaagtcggcgacgaagttgaaatcgtgggtatcaaagatactgcgaaatcaacctgtaccggtgttgagatgttccgtaagctgctggaccagggtcaggcaggcgaaaactgtggtgttctgctgcgcggtatcaagcgtgaagacatccagcgtggccaggttctggctaagccaggctcaatcaagccgcacacccagttcgagtcagaagtttacgttctgtctaaagacgaaggtggccgccatactccgttcttcaaaggctatcgtccacagttctacttccgtacaactgatgtaaccggttcagtagagctgccagaaggcgttgagatggtcatgccaggcgacaacatcaaaatggttgttaccctgatccacccaatcgcaatggacgaa

SEQ ID NO: 135 - DNA, 825 bp, Pantoea dispersa ATCC 14589
cgcgatcctggttgttgctgcgactgatggcccaatgcctcagacccgtgagcacatcctgctgggccgtcaggttggcgttccttacatcatcgtgttcctgaacaagtgtgacatggttgatgacgaagagctgctggaactggttgagatggaagttcgcgatctgctgtctcagtacgacttcccaggcgacgataccccaatcgtacgcggttctgcgctgaaagcgctggaaggcgacgctgagtgggaagcgaaagtcgttgagctggctggtcacctggatacttacattccagatccagtacgtgctatcgatctgccgttcctgctgccaatcgaagacgtattctcaatctctggccgtggtaccgttgttaccggtcgtgttgagcgcggcatcgtgaaagtgggcgacgaagtagaaatcgttggtatcaaagcgactgccaagtctacctgtaccggtgttgaaatgttccgcaaactgctggaccagggtcaggcaggcgagaactgtggtgttctgctgcgcggtatcaagcgtgaagagatccagcgtggtcaggttctggctaagccaggcaccatcaagccacacaccaagttcgtatcagaagtgtacgtactgtctaaagacgaaggcggccgtcatactccgttcttcaaaggctaccgtccacagttctacttccgtacyactgatgtgaccggcamcatmgaactgccagaaggcgttgagatggtaatgccaggcgacaacatcaaaatgrccgttgagctgatccacccaatcgcgatggaccagggtctgcgtttcgc

SEQ ID NO: 136 - DNA, 762 bp, Pasteurella multocida NCTC 10322
cacaaacacgtgagcacatccttttaggtcgccaagtaggcgttccttacatcatcgtattcttaaacaaatgcgacatggtggatgatgaagaattattagaattagttgaaatggaagtgcgtgaacttctttctcaatatgatttcccaggtgatgatacaccaatcgtacgtggttcagcgttacaagcgttaaacggygtagctgagtgggaagagaaaattcttgagttagccaaccacttagatacttacattccagagccacaacgtgcaatcgaccaaccgttccttcttccgattgaagacgtgttctcaatttctggtcgtggtacagtagtaacaggtcgtgttgagcgtggtatcatccgtacaggtgaagaggttgaaattgttggtattaaagcgacaacgaagaccacagtaacaggtgttgagatgttccgtaaattattagacgaaggtcgtgcgggtgagaacgttggtgctttattacgtggtactaarcgtgaagaaatcgaacgtggtcaagtgttagcgaaaccgggttcaatyacgccacacactgattttgaatcagaagtttacgtgttatcaaaagaagaaggtggtcgtcatacaccattcttcaaaggttaccgtccacagttctacttccgtacaacggacgtaacaggtacaatcgaattaccggaaggtgttgagatggtgatgcctggtgataacatcaagatgactgtaagtttgattcacccaatcg

SEQ ID NO: 137 - DNA, 832 bp, Peptostreptococcus anaerobius ATCC 27337
tggagctatcttagttgtatcagcagcggatggaccaatgccacaaacaagagaacacatcttattatcaagacaagtaggagtaccatatatcgtagtatatttgaataaagcagatatggtagaagatgaagaattattagaattagtagaaatggaagtaagagaattactatctgaatatggattcccaggagatgaaattccaatcataacaggatcatccttaggagcattaaatggagaacaaaaatggatagatcaaatcatggcattgatgaaagccgtagatgaatatattccaacaccggaaagagcagtagatcaaccattcttgatgccaatcgaagacgtatttacaattacaggaagaggaactgtagtaacaggaagagttgaaagaggagttgtaaaagtwggagaagaagttgaaatcgtaggaatcaaagcgacaacaaagacaacttgtacyggagtagaaatgttccgaaaattattggatcaaggacaagcaggagataacatcggagctttattragaggaaccaagaaagaagatgtagaaagaggacaagtattggcaaaaccaggaacaattcatcctcatacaaacttcagtggagaagtatatgtattgacaaaagaagaaggaggaagacatactccattcttctcaggatacagaccacaattttactttagaaccacagatattacaggagcagtaacattaccagaaggagtagaaatggtaatgccrggagataatatcacaatgacagtagaattgattcacccaattgcaatggaaacaggattacgatttgcaatt

SEQ ID NO: 138 - DNA, 823 bp, Peptostreptococcus asaccharolyticus strain LSPQ 2639
tagtatgttcagcagcagayggtccaatgccacaaacaagagaacacattctactagcaagacaagttggtgtaccaaagatagtagtattcctaaacaaagaagaccaagtagacgatccagaactaattgaattagtagagatggaaatcagagacctactatcagaatatgacttcgayggagacaacacaccaatcgtagtaggatcagcattaaaagccctagacgatccagacggagaatggggagacaaaatcgtaaaactaatggaagmagtagacgaatacatcccaacaccagtaagagatacagaacacccattcctaatgccaatcgaagacrtattctcaatyacaggaagaggaacagtagcaacaggaagagtagaacaaggtgtagtaaaagtaggmgacacagtagaactagtaggcttaacagacgaaagcagacaagtagtagtaacaggtgtagaaatgtttagaaaacaactagacctagcagaagcmggagacaacattggagccctactaagaggagtacaaagagaagaaatccaaagaggacaagtactagcagcaccaggaacaatcaaaccacacacaaaatttgaagcagaagtatacgtactaacaaaagaagaaggtggaagacacacaccattctttaacggatacagaccacaattctacttcagaacaacagacgtaacaggagacatccaactagcagacggagtagaaatggtaatgccaggagacaactcaacatttacagtaacactaatcacaccaatcgcaatggacgaaggactaagattcgc

SEQ ID NO: 139 - DNA, 832 bp, Peptostreptococcus prevotii ATCC 9321
ctatcatcgtagtatctgcagcagacggtccaatgcccaaacagagagaacacatcctactagcaagacaagtaggcgttccaaaaatcgcagtattcctaaacaaagaagaccaagtagacgatccagaactaatcgaattagtagaaatggaaatcagagacctactttcagaatacgacttcgatggagacaacgctccagtagtagtaggatctgctcttaaatcactagaagaaggcggagaaggcccatggtcagacaaaatccttgacctaatggcacaagtagacgaatacttcgacatcccagaaagagacaacgaccaaccattcctaatgccagtagaagacgtaatgacaatctcaggacgtggaacagtagcaacaggaagagttgaaagaggaacactaaaagttggtgatacagtagaaatcgtaggactaacagaagatacaaaagaaacagtagtaactggagtagaaatgttccacaaatcmctagaccaagcagaatctggagataacgtaggactactactaagaggagtaacaagagatcaaatctcaagaggacaagtactagcaaaaccaggwtcagtaaacccacacacagaattcgaaggtcaagtatacgtactaacaaaagaagaaggtggacgtcacacaccattcttcagtggatatagaccacaattcttctttagaacaacagacgtaacaggagacatcgaactagaagaaggcgtagaaatggtaatgccaggagacaacgcaacattcaaaatcacactccaaaaaccaatcgctctagaagaaggactaagattcgc

SEQ ID NO: 140 - DNA, 831 bp, Porphyromonas asaccharolytica ATCC 25260
cggtgctatcatcgtagttgctgcaactgatggtcctatgcctcagacgcgtgagcacatcctactagcacgtcaggtcaacgtacctcgtctagttgtctttatgaacaagtgcgaccttgttgatgacgaggagatgctcgagctcgtagagatggatatgcgtgagctactaagcttctatgactttgacggcgacaacactcctgtcatccgtggttctgctcttggtgctctcaatggtgagcctaagtgggtagagaaggttatggagctcatggaggctgtagacacttggatcccactacctgagcgcgacatcgacaagcctttcctaatgcctgtagaggacgtattctctatcacaggtcgtggtactgtcgctactggtcgtatcgagactggtgtcgttaaggtcaacgatgaggttcagatcatcggtctaggtgctgagggtaagaagagcgtcgtaactggcgtggaaatgttccgcaagatccttgatgagggtgaagctggtgataacgtaggtctcctactccgtggtatcgacaaggacgagatcaagcgcggtatggtcctagcacacccaggtcaggtcaagcctcacgatcacttcaaggctgaggtctatatcctgaagaaggaagagggtggtcgtcacacaccattccacaacaagtaccgtcctcagttctacatccgtacgctagacgtaacgggcgagatcacactcccagagggtgtagagatggttatgcctggtgataacgtcaccatcgatgtcaagctcatctctccagtagcttgtagcgtaggtctacgcttcgc

SEQ ID NO: 141 - DNA, 818 bp, Porphyromonas gingivalis ATCC 33277
cggtgctataatcgttgtagcagctacagacggtcctatgcctcagactcgcgagcacatccttttggctcgccaggtaaacgttcctcgtctggttgttttcatgaacaaatgtgacatggtagacgatgaagagatgctcgagcttgttgaaatggacatgcgcgaactcctttctttctacgatttcgatggtgacaatacccctatcatccgtggttctgctctgggcgctttgaatggagagcctcagtgggaagacaaggtgatggagcttatggaagctgttgacaactgggttcccctgcctgagcgcgatatcgacaaaccgttcttgatgccggttgaagacgtgttctctatcacgggtcgtggtacggtcgctacaggacgtatcgaaaccggtattgtgaagaccggtgacgaagttcaaatcatcggcctcggtgcagaaggaatgaagtcggttgttacgggtgttgaaatgttccgtaagattcttgacgaaggtcaggctggtgacaacgttggtctcctcctgcgtggtatcgataaggatcagatcaagcgtggtatggttatctctcacccgggtaagattactcctcacaagagatttaaggccgaggtttatatcttgaagaaagaagaaggtggtcgccacactcctttccacaacaaatatcgtccgcagttctacatccgtacgcttgacgtgaccggtgaaatcactcttcccgaaggaacagaaatggttatgcccggtgacaacgtaacgatcactgtagaactcatctacccggttgcatgtaatgtag

SEQ ID NO: 142 - DNA, 830 bp, Pragia fontium ATCC 49100
cggcgctattctggttgttgctgcaactgatggtcctatgcctcaaactcgtgagcacatcctgttaggycgccaggttggcgtaccatacatcattgtgttcctgaacaagtgtgacatggttgaygatgaagagctgttagaactggttgaaatggaagttcgtgagcttctgtctcagtacgatttcccaggtgatgatactccagttgttcgtggttctgcgctgaaagcgttrgaaggcgaagctgagtgggaagctaaaatcattgaattggctgactccctggayagctacattccacagccagagcgtgcaattgataagccgttcctgctgccaatcgaagacgttttctcaatctctggccgtggtacagtagtaaccggtcgtgtagagcgcggtatcgttaaagttggtgaagaagttgaaatcgttggtatcaaagatactgtgaaaacaacttgtactggcgttgaaatgttccgtaarttactggatgaaggccgtgcgggtgagaacgttggtgttctgctgcgtggtactaagcgtgatgaaatcgaacgtggtcaagtattagcaaaaccaggttcaatcaacccgcatactaacttcgtatcagaagtttatatcctgagcaaagatgaaggtggtcgtcatactccattcttcaaaggctaccgtccacagttytacttccgtacaactgacgtgaccggtaccatcgaactgccagaaggcgtagagatggtaatgccaggtgataacattcagatgactgtaactctgattgccccaatcgcgatggacgaaggtttacgcttcgcta

SEQ ID NO: 143 - DNA, 821 bp, Prevotella melaninogenica ATCC 25845
tggtgctatcttggttgtagctgctactgatggtcctatgcctcagactcgtgagcacgtattgctcgctcgtcaggtaaacgtacctcgcttggttgtattcttgaacaagtgtgatatggttgacgatgctgagatgcttgacctcgttgagatggaggttcgtgagatcctcgagcagtacggttatgaggaggatactcctattattcgtggttctgcactcggtgctttgaacggtgttgagaagtgggtagactctgtaatggagctcatggatactgttgacacttggattgaagagccagagcgtgagattgacaagccattcttgatgcctgttgaggacgtattctctatcacaggtcgtggtactgtagctactggtcgtatcgagactggtatctgtaaggtaggtgatgaggttcagttgctcggtctcggtgaggacaagaagtctgttatcactggtgttgagatgttccgtaagaaccttccaacaggtcaggctggtgacaacgtaggtctcctccttcgtggtatcgataaggctgaggttaagcgtggtatggttgttgtgcacccaggtgctattactcctcacgatcacttcaaggcatctatctatgtattgaagaaggaagagggtggtcgtcatactccattcggtaacaagtatcgtccacagttctacctccgtacaatggactgtacaggtgaaatccacctcccagagggcgttgagatggttatgccaggtgacaacgtagagattgaagttgtattgatctataaggttgctttgaacgagggtcttcgtt

SEQ ID NO: 144 - DNA, 827 bp, Prevotella oralis ATCC 33269
tggtgctattcttgtagtagctgctactgacggtcctatgcctcaaactcgtgaacacgtgcttcttgctcgtcaggtgaacgtacctcgtttggtcgttttcttgaacaagtgcgatatggttgacgatgaagaaatgcttgagctcgtagaaatggagcttcatgaacttctcgagcagtatgaatatgaggaggatactcctattgttcgtggttcggcacttggcgctctgaatggagtagagaagtgggttgacagcgtgatgaagttgatggataccgttgatgaatggatacaggaaccaccgcgtgatcttgataagcctttcttgatgccggtagaggatgtattttctattactggtcgtggaacggttgttacaggccgtattgaaactggtaaggttaaggtgggcgatgaagttcaacttcttggtctcggtgaagataagaagtccgttgtgacaggcgttgagatgttccgtaagattcttgacgaaggtgaagctggtgataatgtaggcttgctgcttcgtggtatcgataagacggaagtaaagcgtggtatggttgtcgtacatccgggggctattactcctcacgatcatttcaaggcttcagtttacgtattgaagaaagaagaaggcggtcgccatactccgtttggtamcaagtatcgtccacagttctatcttcgtaccatggactgtactggtgaaattactcttccggaaggagttgagatggtaatgccgggtgataacgtcgaaattgaagttaagttgatctatccggtagctttgaacgagggacttcgtttcgcta

SEQ ID NO: 145 - DNA, 833 bp, Propionibacterium acnes ATCC 6919
cggcgccatcctcgtggttgctgctaccgacggcccgatgcctcagactcgcgagcacgttctgctcgctcgtcaggtgggcgtgcccgccatcgtcgtcgccctcaacaagtgcgacatggttgacgatgaggagctcattgagctcgtcgagatggaggtccgcgagctgctgacctcgcaggagttcgacggcgacaactgccctgtcgttcgcatctccgccttccaggccctccagggtgatgagaagtggacccagtcgatcctcgacctcatggacgccgtggacgagtacatcccgcagcctgagcgcgatctcgacaagcccttccttatgccgatcgaggacgtcttcaccatcaccggccgtggcaccgttgtcaccggtcgtgtcgagcgcggcgtcgtcaagactggcgaagaggtcgagatcgtcggtatccacgagaagacccagaagaccaccgttaccggtgtcgagatgttccgcaagatcctcgacgagggccgcgctggtgagaacgtcggcgttctgctccgtggcaccaagaaggaggatgtcgttcgcggcatggtcctctccaagcctggttccaccaccccccacaccgacttcgagggccaggtctacgtcctcaagaaggatgagggtggccgccacaagccgttcttctcccactacagcccccagttctacttccgtaccacggacgtgactggcactgttgagctccccgagggcaccgagatggtcatgcctggcgacaacaccgacatgactgtgcacctgattcacccggttgccatggaggatcagctcaagttcgcta

SEQ ID NO: 146 - DNA, 745 bp, Proteus mirabilis ATCC 35659
cacaaactcgtgagcacatcctgttaggtcgtcaggttggtgttccttacatcatcgtattcctgaacaaatgtgacatggtagatgatgaagagctgttagaattagttgaaatggaagttcgtgaacttctgtctcaatacgatttcccaggtgatgacactccagtaatccgtggttcagcgctgaaagcactggaaggcgaagcagagtgggaagcaaaaattgttgaattagcagaagcactggattcttatatcccagagccagagcgtgcaattgacaaaccattcctgttaccaatcgaagatgtattctcaatctcaggccgtggtacagtagttactggtcgtgtagagcgtggtatcatcaaagtaggtgatgaagttgagattgttggtatcaaagaaaccgccaaaacaacttgtactggcgttgaaatgttccgtaaattacttgacgaaggtcgtgcaggtgagaacgtaggtgttctgctgcgtggtacaaaacgtgaagaaatcgaacgtggacaagtactggcraaaccaggctcaatcaacccacacaacaaatttgaatcagaagtttatattctgagcaaagatgaaggtggtcgtcacactccattcttcaaaggctaccgtccacagttctacttccgtacaactgacgtaactggtactatcgaattaccagaaggcgtagaaatggtaatgccaggcgacaacgtgaacatgatcgttga

SEQ ID NO: 147 - DNA, 829 bp, Proteus penneri ATCC 33519
ggagctatcctggttgttgctgcgacagatggcccaatgccacaaactcgtgagcacatcctgttaggtcgtcaggttggtgttccttacatcatcgtattcctgaacaaatgtgacatggtagatgatgaagagttactggaattagtmgaaatggaagttcgtgaacttctgtctcagtacgatttcccaggtgatgacactccagtaatccgtggttcagcgctgaaagcactggaaggcgaagcagagtgggaagcaaaaattgttgaattagcagaagcactggattcatacatcccagarccagagcgtgcaattgacaaaccattcctgttaccaattgaagacgtattctcaatttcaggccgtggtacagtagtaacaggtcgtgttgagcgtggcgtaatcaaagttggtgaagaagttgaaatcgttggtattaaaccaacagcgaaaacaacttgtactggcgttgaaatgttccgtaaattacttgacgaaggtcgtgcaggtgagaacgtaggtgttcttctgcgtggtactaaacgtgaagaaatcgaacgtggacaagtactggcgaaaccaggttcaatcaacccacacactaaatttgaatcagaagtttatattctgagcaaagatgaaggtggtcgtcatactccattcttcaaaggctaccgtccacagttctacttccgtacaactgacgtaactggtactatcgaattaccagaaggcgtagaaatggtaatgccaggtgacaacatcaacatgatcgttgaactgattcacccaatcgcgatggacgacggtttacgtttcgcta

SEQ ID NO: 148 - DNA, 824 bp, Proteus vulgaris ATCC 13315
cggagctattctggttgttgctgcgactgatggcccaatgccacaaactcgtgagcacatcctgttaggtcgccaggttggtgtaccttacatcatcgtattcctgaacaaatgtgacatggttgatgatgaagaactgctggaattagtagaaatggaagttcgtgaacttctgtctcagtacgatttcccaggtgatgacactccagtaatccgtggttcagcgctgaaagcactggaaggcgaagctgagtgggaagcaaaaattgttgaattagcagaagcactggattcttacatcccagaaccagagcgtgcaattgacaaaccattcctgctgcctatcgaagacgtattctcaatctctggtcgtggtacagtagtaacaggccgtgtagagcgtggtgttgttaaagttggtgaagaagttgagattgttggtattaaagacacagttaaaacaacttgtactggcgttgaaatgttccgtaaattacttgacgaaggtcgtgcaggtgagaacgtaggtgttcttctgcgtggtactaaacgtgaagaaatcgaacgtggacaagtactggctaaaccaggttcaatcaagccacacactaaattcgaatcagaagtttatatcctgagcaaagatgaaggtggtcgtcacactccattcttcaaaggttaccgtccacagttctacttccgtacaactgacgtaactggtactatcgaattaccagaaggcgtagaaatggtaatgccaggtgacaacatcaacatgatcgttgaactgattcaccctatcgcgtaggacgacggtttacgtt

SEQ ID NO: 149 - DNA, 745 bp, Providencia alcalifaciens ATCC 9886
cacaaactcgtgagcacatcctgttaggtcgccaagtaggtgttccttacatcatcgttttcctgaacaaatgtgacatggtagacgacgaagaactgttagaattagttgaaatggaagttcgtgaacttctgtctcagtacgatttcccaggcgatgacactccagttgttcgcggttcagcactgaaagcgctggaaggcaacccagagtgggaagcaaaaattgttgaattagcaggttacctggattcttacatcccagaaccagagcgtgcaattgacaagccattcctgctgccaatcgaagacgtattctcaatctctggtcgtggtacagtagtaacaggccgtgttgagcgtggtatcatcaaagttggtgaagaagttgaaatcgttggtattcaagcgactgcgaaaacaacttgtactggcgttgaaatgttccgtaaactgctggatgaaggtcgtgcgggtgagaacgttggtgttctgctgcgtggtactaaacgtgaagaaattcaacgtggtcaagtactggctaaaccaggttcaatcaagccacacactcaattcgaatcagaagtatatattctgagcaaagatgaaggtggtcgtcatactccattcttcaaaggctaccgtccacagttctacttccgtacaactgacgtaaccggtactatcgaactgccagaaggcgtagagatggtaatgccaggcgacaacatcaacatgatcgtgac

SEQ ID NO: 150 - DNA, 830 bp, Providencia rettgeri ATCC 9250
cggtgcaatcctggttgttgctgcgactgatggcccaatgccacaaactcgtgagcacatcctgttaggycgccaagtaggtgtwccttacatcatcgttttcctgaacaaatgtgacatggtagacgacgaagaactgttagaattagttgaaatggaagttcgtgaacttctgtctcaatacgatttcccaggcgacgacactccagttgtccgtggttcagctctgaaagcgctggaaggcaacccagagtgggaagcgaaaattgttgaattagcaggtcacttggattcttacatcccagaaccagagcgtgcaattgacaaaccattcctgctgccaatcgaagacgtattctcaatctctggtcgtggtacagtagtaacaggccgtgttgagcgtggtatcatcaaagttggtgaagaagttgaaatcgttggtatccaagacacggttaaaacaacttgtactggcgttgaaatgttccgtaaactgctggacgaaggtcgtgcgggtgagaacgttggtgttctgctgcgtggtactaaacgtgaagaaattcaacgtggtcaagtactggcaaaaccaggttcaatcaagccacacactaaattcgaatcagaagtctatattctgagcaaagatgaaggtggtcgtcacactccattcttcaaaggttaccgtccacagttctacttccgtacaactgacgtaacaggtactatcgaactgccagaaggcgtagagatggtaatgccaggtgataacatcaacatgatcgttaccctgatccacccaatcgcgatggacgacggtttacgtttcgcaa

SEQ ID NO: 151 - DNA, 826 bp, Providencia rustigianii ATCC 33673
cggtgcaatcctggttgttgctgcgactgatggcccaatgccacaaactcgtgagcacatcctgttaggtcgccaagtaggtgttccttacatcatcgttttcctgaacaaatgtgacatggttgacgacgaagaactgttagaattagttgaaatggaagttcgtgaacttctgtctcagtacgatttcccaggcgacgacactccagttgttcgyggttcagcactgaaagcgctggaaggtatccctgagtgggaagcgaaaattgttgaattagccggttacctggacagctacatcccagaaccagagcgcgcaattgaccgtccattcctgctgccaatcgaagacgtattctcaatctctggtcgtggtacagtagtaacaggscgtgttgagcgtggtatcgttaaagttggtgaagaagttgaaatcgttggtatccaagacacrgttaaaacaacttgtactggcgttgaaatgttccgtaaactgcttgacgaaggtcgtgctggtgagaacgttggtgttttactgcgtggtactaagcgtgaagaaattcaacgtggtcaagtactggctaaaccaggttcaatcaagccacacactacttttgaatcagaagtttatattctgagcaaagatgaaggtggtcgtcatactccattcttcaaaggctaccgtccacagttctacttccgtacaactgacgtaaccggtactatcgaactgccagaaggcgtagagatggtaatgccaggcgacaacatcaacatgatcgtgacactgattcacccaatcgcgatggatgatggtttacgtttc

SEQ ID NO: 152 - DNA, 830 bp, Providencia stuartii ATCC 33672
cggtgcaatcctagttgttgcggcaacagatggcccaatgccacaaactcgtgagcacatcctgttaggtcgtcaggttggcgttccttacatcatcgtgttcctgaacaaatgtgacatggtagacgacgaagagctgctggaactggttgaaatggaagttcgtgaacttctgtctcaatacgatttcccaggtgatgacactccagttatccgtggttcagcgctgaaagcgttggaaggcaacccagagtgggaagcgaaaatcgttgaactagcagaagcactggacagctacatcccagagccagagcgtgcaattgacaagccattcctgctgccaatcgaagacgtattctcaatctcaggtcgtggtacagtagtcacaggccgtgttgagcgtggtatcatcaaagttggtgaagaagttgaaatcgtaggtatcaaagagactgcgaaaaccacttgtactggcgttgaaatgttccgtaaactgctggacgaaggccgtgcgggtgagaacgtaggtgttctgctgcgtggtactaagcgtgaagaaatcgaacgtggtcaagttctggcgaaaccaggttcaatcaagccacacacaactttcgaatcagaagtttatattctgagcaaagatgaaggtggtcgtcacacgccattcttcaaaggytaccgtccacagttctacttccgtacaactgacgtaacaggtactatcgaactgccagaaggcgtagagatggtaatgccaggcgacaacgtgaacatgaaagtaactctgattcacccaatcgcgatggacgatggtttgcgtttcgcaa

SEQ ID NO: 153 - DNA, 827 bp, Pseudomonas aeruginosa ATCC 35554
cctggtttgctcggctgccgacggccccatgccgcagacccgcgagcacatcctgctgtcccgccaggtaggcgttccctacatcgtcgtgttcctgaacaaagccgacatggtcgacgacgccgagctgctggaactggtcgagatggaagttcgcgatctgctgaacacctacgacttcccgggcgacgacactccgatcatcatcggttccgcgctgatggcgctggaaggcaaggatgacaacggcatcggcgtaagcgccgtgcagaagctggtagagaccctggactcctacattccggagccggttcgtgccatcgaccagccgttcctcatgccgatcgaagacgtgttctcgatctccggtcgcggtaccgtggtaaccggtcgtgtagagcgcggcatcatcaaggtccaggaagaagtggaaatcgtcggcatcaaggcgaccaccaagaccacctgcaccggcgttgaaatgttccgcaagctgctcgacgaaggtcgtgctggtgagaacgttggtatcctgctgcgtggcaccaagcgtgaagacgtagagcgtggccaggtactggccaagccgggcaccatcaagccgcacaccaagttcgagtgcgaagtgtacgtgctgtccaaggaagaaggtggtcgtcacaccccgttcttcaagggctaccgtccgcagttctacttccgtaccackgacgtgaccggtamctgcgagctgccggaaggcgtagagatggtaatgccgggcgacaacatcaagatggttgtcaccctgatcgctccgatcgccatggaagatggctgcgttcgcg

SEQ ID NO: 154 - DNA, 841 bp, Pseudomonas fluorescens ATCC 13525
cggcgcaatcctggtttgctcggccgctgatggtccgatgccacaaacccgtgaacacatcctgctgtcccgtcaggttggcgttccgtacatcgtggtttacctgaacaaggctgacctggtagacgacgctgagctgctggaactggttgagatggaagtgcgcgatctgctgagcacttacgacttcccaggcgacgacactccgatcatcatcggttctgctcgtatggctctggaaggcaaagacgacaacgaaatgggcaccacgtccgttcgtaaactggttgaaactctggacagctacatcccagatccagttcgtgttatcgacaagccgttcctgatgccaatcgaagacgtgttctcgatctccggtcgcggtactgttgtgactggtcgtatcgagcgcggtatcgttaaggttcaagatccactggaaatcgttggtctgcgtgacactaccgtcaccacctgcaccggtgttgaaatgttccgtaagctgctcgacgaaggtcgtgctggcgagaactgcggcgttctgctgcgtggtaccaagcgtgacgacgttgagcgtggccaggttctggttaagccaggttcggttaagccgcacaccaagttcgaagctgaagtctacgtactgagcaaagaagaaggcggtcgtcacactccgttcttcaaaggctaccgtccacagttctacttccgtactactgacgtgactggtaactgcgagctgccggaaggcgttgaaatggttatgccaggcgacaacatcaaaatggttgttaccctgatcaaaaccatcgcaatggaagacggtctgcgtttcgctatt

SEQ ID NO: 155 - DNA, 841 bp, Pseudomonas stutzeri ATCC 17588
cggcgcgatcctggtctgctcggctgctgacggccccatgccgcagactcgcgagcacatcctgctgtcccgtcaggttggtgttccgtacatcgtcgtgttcctgaacaaggccgacatggttgatgacgccgagctgctcgagctggtcgagatggaagttcgygacctgctgtcgacctacgacttcccgggtgaygacactccgatcatcatcggctccgcgctgatggcgctgaacggcgaagacgacaacgagctcggcaccactgcggtgaagaagctggtcgagaccctggacagctacattcccgagccggttcgtgccatcgacaagccgttcctgatgccgatcgaagacgtgttctcgatctccggtcgcggcacsgtggtaaccggtcgcgtagagcgcggcatcgtcaaggttcaggaagagatcgagatcgtcggtctgcgtccgaccaccaagactacctgcaccggcgttgagatgttccgcaagctgctcgaygarggtcgtgctggcgagaactgcggygtgctgctgcgtggcaccaagcgtgacgaagtggagcgtggtcaggttctggccaagccgggcaccatcaagccgcacaccaagttcgaagccgaagtgtacgtgctgtccaaggaagaaggtggtcgtcacaccccgttcttyaagggctaccgtcckcagttctacttccgtaccactgaygtgacyggwtcgtgcgarctgccggaaggcgtcgagatggtaatgccgggcgacaacgtgaagatggttgtcaccctgatcaagccgatcgccatggaagacggcctgcgcttcgcgatt

SEQ ID NO: 156 - DNA, 833 bp, Psychrobacter phenylpyruvicus ATCC 23333
gctattctagtagtatcagcaactgacggtccaatgccacaaacacgtgagcacattctattatcacgtcaggttggtgtaccatacatcatcgtattcatgaacaaatgtgacatggtagatgacgaagagttactagagctagtagaaatggaagtgcgtgaattactttcagactacgacttcccaggtgatgacactccaatcatcaaaggttcagctttagaagcgttaaatggtaacgacggtaagtacggtgagccagcagttatcgaactactaaacactctagacacttacattccagagccagagcgtgacatcgataagccattcctaatgccaatcgaagacgtattctcaatctcaggtcgtggtacagtagtaacaggccgtgttgaatctggtatcatcaaagttggtgacgaaatcgaaatcgttggtatcaaagacacagttaaaacaacttgtactggtatcgagatgttccgtaagttactagacgaaggtcgtgctggtgagaactgtggtgtactattacgtggtactaagcgtgaagacgtacaacgtggtcaagtacttgctaagccaggttcaatcactccacacaccaacttcgacgcagaagtatacgtactatcaaaagaagaaggtggtcgtcacactccattcttaaatggttaccgtccacagttctacttccgtactactgacgtaacaggtgcaatcacgttacaagaaggtactgaaatggtaatgccaggcgataacgttgagatgagcgtagagctaatccacccaatcgctaggacaaaggtttacgtttcgcaatc

SEQ ID NO: 157 - DNA, 825 bp, Rahnella aquatilis ATCC 33071
ggcgctatcctggttgttgctgcaactgacggccctatgcctcagactcgtgagcacatcctgctgggtcgccaggttggcgttccatacatgatcgtgttcatgaacaaatgcgacatggtagatgacgaagagctgctggaactggtagaaatggaagttcgcgaacttctgtctgcttacgaattcccaggcgacgacatcccggtcatcaaaggttcagcgctgaaagcactggaaggcgatgctacttgggaagcgaaaatcatcgaactggcagaagcactggacagctacattccattgccagagcgtgctatcgataagccattcctgctgccaatcgaagacgtattctccatctccggtcgtggtacagtggttaccggtcgtgtagagcgcggtatcgttaaagtgggcgaagaagttgaaatcgtcggtatcaaggacactgttaagtctacttgtactggcgttgaaatgttccgcaaactgctggacgaaggccgtgcgggcgagaacgtgggtgttctgctgcgtggtatcaagcgtgaagacatcgaacgtggtcaggttctggctaaaccaggttcaatcaaaccacacaccaagtttgattccgaagtgtacatcctgagcaaagatgaaggtggtcgtcacactccattcttcaaaggctaccgtccacagttctacttccgtacaactgacgtgaccggtactatcgaactgccagaaggcgttgagatggttatgcctggtgacaacgtgaacatggttgttaccctgatccacccaatcgcgatggatgacggtctgcgtttc

SEQ ID NO: 158 - DNA, 830 bp, Salmonella choleraesuis subsp. arizonae ATCC 13314
cggcgcgatcctggttgttgctgcgactgacggcccgatgccgcagacccgtgagcacatcctgctgggccgtcaggtaggcgttccgtacatcatcgtgttcctgaacaaatgcgacatggttgatgacgaagagctgctggaactggttgaaatggaagttcgtgaacttctgtctcagtacgacttcccgggcgacgatacgccgatcgttcgtggttctgctctgaaagcgctggaaggcgacgcagagtgggaagcgaaaatcatcgaactggctggcttcctggactcttacatcccggaaccagagcgtgcgattgacaagccgttcctgctgccgatcgaagacgtattctccatctccggtcgtggtaccgttgttaccggtcgtgtagaacgcggtatcatcaaagtgggcgaagaagttgaaatcgttggtatcaaagagactcagaagtctacctgtactggcgttgaaatgttccgcaaactgctggacgaaggccgtgccggtgagaacgtaggtgttctgctgcgtggtatcaaacgtgaagaaatcgaacgtggtcaggtactggctaagccgggcaccatcaagccgcacaccaagttcgaatctgaagtgtacattctgtccaaagatgaaggcggccgtcatactccgttcttcaaaggctaccgtccgcagttctacttccgtactactgacgtgactggcaccatcgaactgccggaaggcgtggagatggtaatgccgggcgacaacatcaaaatggttgttaccctgatccacccgatcgcgatggacgacggtctgcgtttcgcaa

SEQ ID NO: 159 - DNA, 832 bp, Salmonella choleraesuis subsp. choleraesuis ATCC 7001
cggcgcgatcctggttgttgctgcgactgacggyccgatgccgcagacccgtgagcacatcctgctgggtcgtcaggtaggcgttccgtacatcatcgtgttcctgaacaaatgcgacatggttgatgacgaagagctgctggaactggttgaaatggaagttcgtgaacttctgtctcagtacgacttcccgggcgacgacacgccgatcgttcgtggttctgctctgaaagcgctggaaggtgacgcagagtgggaagcgaaaatcatcgaactggctggcttcctggattcttacattccggaaccagagcgtgcgattgacaagccgttcctgctgccgatcgaagacgtattctccatctccggtcgtggtaccgttgttaccggtcgtgtagagcgcggtatcatcaaagtgggygaagaagttgaaatcgttggtatcaaagagactcagaagtctacctgtactggcgttgaaatgttccgcaaactgttggacgaaggccgtgccggtgagaacgtaggtgttctgctgcgtggtatcaaacgtgaagaaatcgaacgtggtcaggtactggctaagccgggcaccatcaagccgcacaccaagttcgaatctgaagtgtacattctgtccaaagatgaaggcggccgtcatactccgttcttcaaaggctaccgtccgcagttctacttccgtactactgacgtgactggcaccatcgaactgccggaaggcgtagagatggtaatgccgggcgacaacatcaaaatggttgttaccctgatccacccgatcgcaatggacgacggtctgcgtttcgcaatc

SEQ ID NO: 160 - DNA, 807 bp, Salmonella choleraesuis subsp. diarizonae ATCC 43973
cctggttgttgctgcgactgacggcccgatgccgcagacccgtgagcacatcctgctgggtcgtcaggtaggcgttccgtacattatcgtgttcctgaacaaatgcgacatggttgatgacgaagagctgctggaactggtagaaatggaagttcgtgaacttctgtctcagtacgacttcccgggcgacgacacgccaatcgttcgtggttctgctctgaaagcgctggaaggcgacgcagagtgggaagcgaaaatcatcgaactggctggcttcctggattcttacatcccggaaccagagcgtgcgattgacaagccgttcctgctgccgatcgaagacgtattctccatctccggtcgtggtaccgttgttaccggtcgtgtagagcgcggtatcatcaaagtgggcgaagaagttgaaatcgttggtatcaaagagactcagaagtctacctgtactggcgttgaaatgttccgcaarctgctggacgaaggccgtgcwggtgagaacgtaggtgttctgctgcgtggtatcaaacgtgaagaaatcgaacgtggtcaggtactggctaagccgggcaccatcaagccgcacaccaagttcgaatctgaagtgtatattctgtccaaagatgaaggcggccgtcatactccgttcttcaaaggctaccgtccgcagttctacttccgtaccactgacgtgactggcaccatcgaactgccggaaggcgtggagatggtaatgccgggcgacaacatcaaaatggttgttaccctgatccacccgatcgcgatggacgacgg

SEQ ID NO: 161 - DNA, 832 bp, Salmonella choleraesuis subsp. choleraesuis ATCC 8326
cggcgcgatcctggttgttgctgcgactgacggcccgatgccgcagacccgtgagcacatcctgctgggtcgtcaggtaggcgttccgtacatcatcgtgttcctgaacaaatgcgacatggttgatgacgaagagctgctggaactggttgaaatggaagttcgtgaacttctgtctcagtacgacttcccgggcgacgacactccgatcgttcgtggttctgctctgaaagcgctggaaggcgacgcagagtgggaagcgaaaatcatcgaactggctggcttcctggattcttacatcccggaaccagagcgtgcgattgacaagccgttcctgctgccgatcgaagacgtattctccatctccggtcgtggtaccgttgttaccggtcgtgtagaacgcggtatcatcaaagtgggcgaagaagttgaaatcgttggtatcaaagagactcagaagtctacctgtactggcgttgaaatgttccgcaaactgctggacgaaggccgtgccggtgagaacgtaggtgttctgctgcgtggtatcaaacgtgaagaaatcgaacgtggtcaggtactggctaagccgggcaccatcaagccgcacaccaagttcgaatctgaagtgtacattctgtccaaagatgaaggcggccgtcayactccgttcttcaaaggctaccgtccgcagttctacttccgtactactgacgtgactggcaccatcgaattgccggaaggcgtagagatggtaatgccgggcgacaacatcaaaatggttgttaccctgatccacccgatcgcgatggacgacggtctgcgtttcgcaatc

SEQ ID NO: 162 - DNA, 807 bp, Salmonella choleraesuis subsp. houtenae ATCC 43974
cctggttgttgctgcgactgacggcccgatgccgcagacccgtgagcacatcctgctgggtcgtcaggtaggcgttccgtacatcatcgtgttcctgaacaaatgcgacatggttgatgacgaagagctgctggaactggtagaaatggaagttcgtgaacttctgtctcagtacgatttcccgggcgacgacacgccgatcgtgcgtggttctgctctgaaagcgctggaaggcgacgcagaatgggaagcgaaaatcatcgaactggctggctacctggattcttacatcccggaaccagagcgtgcgattgacaaaccgttcctgctgccgatcgaagacgtattctctatctccggtcgtggtaccgttgttaccggtcgtgtagagcgcggtatcatcaaagtgggcgaagaagttgaaatcgttggtatcaaagagactcagaagtcgacctgtactggcgttgaaatgttccgcaaactgctggacgaaggccgtgctggcgagaacgtaggtgttctgctgcgtggtatcaaacgtgaagaaatcgaacgtggtcaggtactggctaagccgggcaccatcaagccgcacaccaagttcgaatctgaagtgtacattctgtccaaagatgaaggcggccgtcatactccgttcttcaaaggctaccgtccgcaattctacttccgtacgactgacgtgactggcaccatcgaactgccggaaggcgtggagatggtaatgccgggcgacaacatcaaaatggttgttaccctgatccacccgatcgcgatggacgacgg

SEQ ID NO: 163 - DNA, 827 bp, Salmonella choleraesuis subsp. indica ATCC 43976
cgcgatcctggttgttgctgcgactgacggcccgatgccgcagacccgtgagcacatcctgctgggtcgtcaggtaggcgttccgtacatcatcgtgttcctgaacaaatgcgacatggttgatgacgaagagctgctggaactggttgaaatggaagttcgtgaacttctgtctcagtacgacttcccgggtgacgacacgccgatcgtgcgtggttctgctctgaaagcgctggaaggcgacgcagagtgggaagcgaaaatcatcgaactggctggcttcctggattcttacattccggaaccagagcgtgcgattgacaagccgttcctgctgccgatcgaagacgtattctccatctccggtcgtggtacygttgttaccggtcgtgtagagcgcggtatcatcaaagtgggcgaagaagttgaaatcgttggtatcaaagagactcagaagtctacctgtactggcgttgaaatgttccgcaaactgctggacgaaggccgtgccggtgagaacgtaggtgttctgctgcgtggtatcaaacgtgaagaaatcgaacgtggtcaggtactggctaagccgggcaccatcaagccgcacaccaagttcgaatctgaagtgtacattctgtccaaagatgaaggcggccgtcatactccgttcttcaaaggctaccgtccgcagttctacttccgtactactgacgtgactggcaccatcgaactgccggaaggcgtagagatggtaatgccgggcgacaacatcaaaatggttgttaccctgatccatccgatcgcratggacgacggtctgcgtttcgcaa

SEQ ID NO: 164 - DNA, 807 bp, Salmonella choleraesuis subsp. salamae ATCC 43972
cctggttgttgctgcgactgacggcccgatgccgcagacccgtgagcacatcctgctgggtcgtcaggtaggcgttccgtacatcatcgtgttcctgaacaaatgcgacatggttgatgacgaagagctgctggaactggtagaaatggaagttcgtgaacttctgtctcagtacgacttcccgggcgacgacacgccgatcgtgcgtggttccgctctgaaagcgctggaaggcgamgctgagtgggaagmgaaaatcatcgaactggctggctwcctggattcttacattccggaaccagagcgtgcgattgacaagccgttcctgctgccgatcgaagacgtattctccatctccggtcgtggtaccgttgttaccggtcgtgtagagcgcggtatcatcaaagtgggcgaagaagttgaaatcgttggtatcaaagagactcagaagtctacctgtactggcgttgaaatgttccgcaaactgctggacgaaggccgtgccggtgagaacgtaggtgttctgctgcgtggtatcaaacgtgaagaaatcgaacgtggtcaggtactggctaagccgggcaccatcaagccgcacaccaagttcgaatctgaagtgtacattctgtccaaagatgaaggcggccgtcatactccgttcttcaaaggctaccgtccgcagttctacttccgtaccactgacgtgactggcaccatcgaactgccggaaggcgtggagatggtaatgccgggcgacaacatcaaaatggttgttaccctgatccacccgatcgcgatggacgacgg

SEQ ID NO: 165 - DNA, 832 bp, Salmonella choleraesuis subsp. choleraesuis ATCC 10749
  misc_feature (1)...(832): n=a,t,c or g
cggcgcgatcctggttgttgctgcgactgacggcccgatgccgcagacccgtgagcacatcctgctgggtcgtcaggtaggcgttccgtacatcatcgtgttcctgaacaaatgcgacatggttgatgacgaagagctgctggaactggttgaaatggaagttcgtgaacttctgtctcagtacgacttcccgggcgacgacacgccgatcgttcgtggttctgctctgaaagcgctggaaggcgacgcagagtgggaagcgaaaatcatcgaactggctggcttcctggattcttacatcccggaaccagagcgtgcgattgacaagccgttcctgctgccgatcgaagacgtattctccatctccggtcgtggtaccgttgttaccggtcgtgtagaacgcggtatcatcaaagtgggcgaagaagttgaaatcgttggtatcaaagagactcagaagtctacctgtactggcgttgaaatgttccgcaaactgctggacgaaggccgtgcnggtgagaacgtaggtgttctgctgcgtggtatcaaacgtgaagaaatcgaacgtggtcaggtactggctaagccgggcaccatcaagccgcacacyaagttcgaatctgaagtgtacattctgtccaaagatgaaggcggccgtcatactccgttcttcaaaggctaccgtccgcagttctacttccgtactactgacgtgactggcaccatcgaactgccggaaggcgtagagatggtaatgccgggcgacaacatcaaaatggttgttaccctgatccacccgatcgcaatggacgacggtctgcgtttcgcaatc

SEQ ID NO: 166 - DNA, 817 bp, Serratia fonticola DSM 4576
cggcgctatcctggttgtagctgcgactgacggccctatgcctcagactcgtgagcacatcctgctgggtcgtcaggttggcgttccttacatcatcgtattcatgaacaaatgcgacatggttgatgatgaagagctgctggaactggtagaaatggaagttcgtgaacttctgtctgcttatgacttccctggtgatgacctgccggttgttcgtggttcagcgctgaaagcactggaaggcgaagctgagtgggaagctaaaatcatcgagctggccggtcacctggattcctacatcccagaaccagagcgtgctatcgatcagccgttcctgctgccaatcgaagacgtattctccatctccggtcgtggtaccgtagttaccggtcgtgttgagcgcggtatcgttaaagttggcgaagaagttgaaatcgttggtatcaaagacaccgttaagtctacctgtactggcgttgaaatgttccgcaaactgctggacgaaggccgtgctggtgagaacgttggtgttctgctgcgtggtatcaagcgtgaagacatcgaacgtggtcaggtactggctaaaccaggttccatcaagccgcacactcagttcgattcagaagtgtatatcctgagcaaagaagaaggtggtcgtcatactccattcttcaaaggctaccgtccacagttctacttccgtacaactgacgtgaccggtaccatcgaactgccagaaggcgtagagatggtaatgccaggcgataacgtgaacatggttgttaccctgatccacccaatcgctatggaccaaggc

SEQ ID NO: 167 - DNA, 787 bp, Serratia liquefaciens ATCC 27592
gctgcgactgacggcccaatgcctcagacccgtgagcacatcctgctgggtcgtcaggttggcgttcctttcatcatcgtattcatgaacaaatgcgacatggttgatgatgaagagctgctggaactggtagaaatggaagttcgtgaacttctgtctgcttacgacttccctggtgatgacctgccggttgttcgtggttcagcgctgaaagcactggaaggcgaagctgagtgggaagctaaaatcatcgagctggccggttacctggattcttacatcccagaaccagagcgtgctatcgacaagccgttcctgctgccaatcgaagacgtcttctccatctccggtcgtggtaccgttgttaccggtcgtgttgagcgcggtatcgttaaagttggcgaagaagttgaaatcgttggtatcaaagacaccgttaagtctacctgtactggcgttgaaatgttccgcaaactgctggacgaaggccgtgctggtgagaacgttggtgttctgctgcgtggtatcaagcgtgaagacatcgaacgtggtcaggtactggctaaaccaggttcaatcaagccacacaccaagttcgactcagaagtgtacatcctgagcaaagaagaaggtggtcgtcatactccattcttcaaaggctaccgtccacagttctacttccgtacaactgacgtgaccggtaccatcgaactgccagaaggcgttgaaatggtaatgccaggtgacaacgtgaacatggttgttaccctgatccacccaatcgcga

SEQ ID NO: 168 - DNA, 745 bp, Serratia marcescens ATCC 13880
gcctcagactcgtgagcacatcctgctgggtcgtcaggttggcgttcctttcatcatcgtattcatgaacaaatgcgacatggttgatgatgaagagctgytggaactggtagaaatggaagttcgcgaactgctgtccgcttacgacttccctggcgacgacctgccggtaatccgcggttccgcgctgaaagcgctggaaggcgaagctgagtgggaagcgaaaatcatcgaactggccgaagccctggacagctacatcccagagccagagcgtgctatcgacaagccgttcctgctgccaatcgaagacgtattctccatctccggtcgtggtaccgttgttaccggtcgtgttgagcgcggcatcatcaaagttggcgaagaagttgaaatcgttggtatcaaagacaccgttaagtctacctgtactggcgttgaaatgttccgcaaactgctggacgaaggccgtgctggtgagaacgtaggtgttctgctgcgtggtatcaaacgtgaagaaatcgaacgtggtcaggtactggctaagccaggctccatcaagccgcacacccagttcgaatctgaagtgtacatcctgagcaaagatgaaggtggtcgtcacackccattcttcaaaggctaccgtccacagttctacttccgtaccactgacgtgaccggtaccatcgaactgccagaaggcgtagagatggtaatgccaggcgacaacgtgaacatggttgta

SEQ ID NO: 169 - DNA, 829 bp, Serratia odorifera ATCC 33077
ggcgcaatcctggttgttgctgcgactgacggccctatgcctcagacccgtgagcacatcctgctgggtcgccaggttggcgttcctttcatcatcgtgttcatgaacaaatgtgacatggttgatgacgaagagctgctggaactggtagaaatggaagttcgcgagctgctgtctgcttacgatttccctggcgacgacctgccagtaatccgcggttctgcgctgaaagcgctggaaggcgaagcagagtgggaagctaagattgtagaactggctgaagcgctggattcttacatcccagaaccagagcgtgctatcgacaagccgttcctgctgccaatcgaagacgtattctccatctccggtcgtggtaccgttgttaccggtcgtgttgagcgcggtatcatcaaagttggcgaagaagttgaaatcgttggtatcaaagacaccgttaagtctacctgtaccggtgtagaaatgttccgcaaactgctggacgaaggccgtgctggtgagaacgttggtgttctgctgcgtggtatcaagcgtgaagacatcgaacgtggtcaggttctggctaaaccaggttctatcaagccgcacaccaaattcgactcagaagtgtacatcctgagcaaagaagaaggtggtcgtcacacgccattcttcaaaggctaccgtccacagttctacttccgtactactgacgtgaccggtaccatcgaactgccagaaggcgtagagatggtaatgccaggcgataacgtgaacatggttgttaccctgattcacccaatcgcaatggacgacggtctgcgtttcgcaa

SEQ ID NO: 170 - DNA, 830 bp, Serratia plymuthica DSM 4540
cggcgcaatcctggttgttgctgcgactgacggcccaatgcctcagacccgtgagcacatcctgctgggtcgtcaggttggcgttcctttcatcatcgtattcatgaacaaatgcgacatggttgatgatgaagagctgctggaactggtagaaatggaagttcgtgaacttctgtctgcttacgacttccctggtgatgacctgccggttgttcgtggttcagcgctgaaagcactggaaggcgaaccagagtgggaagctaaaatcatcgagctggctggtttcctggattcttacatcccagaaccagagcgtgctatcgacaagccgttcctgctgccaatcgaagacgtattctccatctccggtcgtggtaccgttgttaccggtcgtgttgagcgcggtatcgttaaagttggcgaagaagttgaaatcgtgggtatcaaagacaccgttaagtctacctgtaccggcgttgaaatgttccgcaaactgctggacgaaggccgtgctggtgagaacgtgggtgttctgctgcgtggtatcaagcgcgaagatatcgaacgtggtcaggtcctggctaaaccaggttcaatcaagccacacaccaagtttgactcagaagtgtacatcctgagcaaagaagaaggtggtcgtcatactccattcttcaaaggctaccgtccacagttctacttccgtacaactgacgtgaccggtaccatcgaactgccagaaggcgtagagatggtaatgccaggtgacaacgtgaacatggttgtaaccctgatccacccaatcgcgatggacgacggcctgcgtttcgcaa

SEQ ID NO: 171 - DNA, 829 bp, Serratia rubidaea ATCC 27593
ggcgcaatcctggtagtagcagcgactgacggcccaatgcctcagacccgtgagcacatcctgctgggccgccaggtaggcgtaccttacatcatcgtattcatgaacaaatgcgacatggtagatgatgaagagctgctggaactggtagagatggaagttcgcgaactgctgtctgcttacgacttcccaggcgacgacctgccggtaatccgtggttccgcgctgaaagcgctggaaggcgaagccgagtgggaagcgaaaatcgttgagctggcagaagcgctggacagctacatcccagagccagagcgtgctgtagacaagccgttcctgctgccaatcgaagacgtattctccatctccggtcgtggtaccgttgttaccggtcgtgtagagcgcggtatcatcaaagttggtgaagaagtagaaatcgtaggtatcaaagacaccgttaagtctacctgtactggcgtagaaatgttccgcaaactgctggacgaaggccgtgctggtgagaacgtaggtgttctgctgcgtggtatcaagcgtgaagaaatcgaacgtggtcaggtactggcgaagccaggttcaatcaagccgcacacccagttcgaatctgaagtgtacattctgtccaaagacgaaggcggccgtcatactccgttcttcaaaggctaccgtccacagttctacttccgtacaactgacgtgaccggtaccatcgaactgccagaaggcgtagagatggtaatgccaggcgacaacgtgaacatgaaagttactctgattcacccaatcgcaatggacgacggtctgcgtttcgcaa

SEQ ID NO: 172 - DNA, 826 bp, Shigella boydii ATCC 9207
cggcgcgatcytggtagttgctgcgactgacggcccgatgccgcagactcgtgagcacatcctgctgggtcgtcaggtaggcgttccgtacatcatcgtgttcctgaacaaatgcgacatggttgatgacgaagagctgctggaactggttgaaatggaagttcgtgaacttctgtctcagtacgacttcccgggcgacgacactccgatcgttcgtggttctgctctgaaagcgctggaaggcgacgcagagtgggaagcgaaaatcctggaactggctggcttcctggattcttacattccggaaccagagcgtgcgattgacaagccgttcctgctgccgatcgaagacgtattctccatctccggtcgtggtaccgttgttaccggtcgtgtagaacgcggtatcatcaaagttggtgaagaagttgaaatcgttggtatcaaagagactcagaagtctacctgtactggcgttgaaatgttccgcaaactgctggacgaaggccgtgctggtgagaacgtaggtgttctgctgcgtggtatcaaacgtgaagaaatcgaacgtggtcaggtactggctaagccgggcaccatcaagccgcacaccaagttcgaatctgaagtgtacattctgtccaaagatgaaggcggccgtcatactccgttcttcaaaggctaccgtccgcagttctacttccgtactactgacgtgactggtaccatcgaactgccggaaggcgtagagatggtaatgccgggcgacaacatcaaaatggttgttaccctgatccacccgatcgcgatggacgacggtctgcgtttc

SEQ ID NO: 173 - DNA, 818 bp, Shigella dysenteriae ATCC 11835
tggtagttgctgcgactgacggcccgatgccgcagactcgtgagcacatcctgctgggtcgtcaggtaggcgttccgtacatcatcgtgttcctgaacaaatgcgacatggttgatgacgaagagctgctggaactggttgaaatggaagttcgtgaacttctgtctcagtacgacttcccgggcgacgacactccgatcgttcgtggttctgctctgaaagcgctggaaggcgacgcagagtgggaagcgaaaatcctggaactggctggcttcctggattcytayattccggaaccagagcgtgcgattgacaagccgttcctgctgccgatcgaagacgtattctccatctccggtcgtggtaccgttgttaccggtcgtgtagaacgcggtatcatcaaagttggtgaagaagttgaaatcgttggtatcaaagagacycagaagtctacctgtactggcgttgaaatgttccgcaaactgctggacgaaggccgtgctggtgagaacgtaggtgttctgctgcgtggtatcaaacgtgaagaaatcgaacgtggtcaggtactggcgaagccrggcaccatcaagccgcacaccaagttcgaatctgaagtgtacattctgtccaaagatgaaggcggccgtcatactccgttcttcaaaggctaccgtccgcagttctacttccgtactactgacgtgactggtaccatcgaactgccggaaggcgtagagatggtaatgccgggcgacaacatcaaaatggttgttaccctgatccacccgatcgcgatggacgacggtctgcgtttcgca

SEQ ID NO: 174 - DNA, 806 bp, Shigella flexneri ATCC 12022
cctggtagttgctgcgactgacggcccgatgccgcagactcgtgagcacatcctgctgggtcgtcaggtaggcgttccgtacatcatcgtgttcctgaacaaatgcgacatggttgatgacgaagagctgctggaactggttgaaatggaagttcgtgaacttctgtctcagtacgacttcccgggcgacgacactccgatcgttcgtggttctgctctgaaagcgctggaaggcgacgcagagtgggaagcgaaaatcctggaactggctggcttcctggattcttacattccggaaccagagcgtgcgattgacaagccgttcctgctgccgatcgaagacgtattctccatctccggtcgtggtaccgttgttaccggtcgtgtagaacgcggtatcatcaaagttggtgaagaagttgaaatcgttggtatcaaagagactcagaagtctacctgtactggcgttgaaatgttccgcaaactgctggacgaaggccgtgctggtgagaacgtaggtgttctgctgcgtggtatcaaacgtgaagaaatcgaacgtggtcaggtactggctaagccgggcaccatcaagccgcacaccaagttcgaatctgaagtgtacattctgtccaaagatgaaggcggmcgtcatactccgttcttcaaaggctaccgtccgcagttctacttccgtactactgacgtgactggtaccatcgaactgccggaaggcgtagagatggtaatgccgggcgacaacatcaaaatggttgttaccctgatccacccgatcgcgatggacgacg

SEQ ID NO: 175 - DNA, 832 bp, Shigella sonnei ATCC 29930
cggcgcgatcctggtagttgctgcgactgacggcccgatgccgcagactcgtgagcacatcctgctgggtcgtcaggtaggcgttccgtacatcatcgtgttcctgaacaaatgcgacatggttgatgacgaagagctgctggaactggttgaaatggaagttcgtgaacttctgtctcagtacgacttcccgggcgacgacactccgatcgttcgtggttctgctctgaaagcgctggaaggcgacgcagagtgggaagcgaaaatcctggaactggctggcttcctggattcttacattccggaaccagagcgtgcgattgacaagccgttcctgctgccgatcgaagacgtattctccatctccggtcgtggtaccgttgttaccggtcgtgtagaacgcggtatcatcaaagttggtgaagaagttgaaatcgttggtatcaaagagactcagaagtctacctgtactggcgttgaaatgttccgcaaactgctggacgaaggccgtgctggtgagaacgtaggtgttctgctgcgtggtatcaaacgtgaagaaatcgaacgtggtcaggtactggctaagccgggcaccatcaagccgcacaccaagttcgaatctgaagtgtacattctgtccaaagatgaaggcggycgtcatactccgttcttcaaaggctaccgtccgcagttctacttccgtactactgacgtgactggtaccatcgaactgccggaaggcgtagagatggtaatgccgggcgacaacatcaaaatggttgttaccctgatccacccgatcgcgatggacgacggtctgcgtttcgcaatc

SEQ ID NO: 176 - DNA, 716 bp, Staphylococcus aureus ATCC 13301
tctgctgctgacggtccaatgccacaaactcgtgaacacattcttttatcacgtaacgttggtgtaccagcattagtagtattcttaaacaaagttgacatggttgacgatgaagaattattagaattagtagaaatggaagttcgtgacttattaagcgaatatgacttcccaggtgacgatgtacctgtaatcgctggttcagcattaaaagctttagaaggcgatgctcaatacgaagaaaaaatcttagaattaatggaagctgtagatacttacattccaactccagaacgtgattctgacaaaccattcatgatgccagttgaggacgtattctcaatcactggtcgtggtactgttgctacaggccgtgttgaacgtggtcaaatcaaagttggtgaagaagttgaaatcatcggtttacatgacacatctaaaacaactgttacaggtgttgaaatgttccgtaaattattagactacgctgaagctggtgacaacattggtgcattattacgtggtgttgctcgtgaagacgtacaacgtggtcaagtattagctgctcctggttcaattacaccacatactgaattcaaagcagaagtatacgtattatcaaaagacgaaggtggacgtcacactccattcttctcaaactatcgtccacaattctatttccgtactactgacgtaactggtgttgttcacttacc

SEQ ID NO: 177 - DNA, 719 bp, Staphylococcus aureus ATCC 29247
ttcttttatcacgtaacgttggtgtaccagcattagtagtattcttaaacaaagttgacatggttgacgatgaagaattattagaattagtagaaatggaagttcgtgacttattaagcgaatatgacttcccaggtgacgatgtacctgtaatcgctggttcagcattaaaagctttagaaggcgatgctcaatacgaagaaaaaatcttagaattaatggaagctgtagatacttacattccaactccagaacgtgattctgacaaaccattcatgatgccagttgaggacgtattctcaatcactggtcgtggtactgttgctacaggccgtgttgaacgtggtcaaatcaaagttggtgaagaagttgaaatcatcggtttacatgacacatctaaaacaactgttacaggtgttgaaatgttccgtaaattattagactacgctgaagctggtgacaacattggtgcattattacgtggtgttgctcgtgaagacgtacaacgtggtcaagtattagctgctcctggttcaattacaccacatactgaattcaaagcagaagtatacgtattatcaaaagacgaaggtggacgtcacactccattcttctcaaactatcgtccacaattctatttccgtactactgacgtaactggtgttgttcacttaccagaaggtmctgaaatggtaatgcctggtgataacgttgaaatg

SEQ ID NO: 178 - DNA, 625 bp, Staphylococcus aureus ATCC 33591
gtgaacacattcttttatcacgtaacgttggtgtaccagcattagtagtattcttaaacaaagttgacatggttgacgatgaagaattattagaattagtagaaatggaagttcgtgacttattaagcgaatatgacttcccaggtgacgatgtacctgtaatcgctggttcagcattaaaagctttagaaggcgatgctcaatacgaagaaaaaatcttagaattaatggaagctgtagatacttacattccaactccagaacgtgattctgacaaaccattcatgatgccagttgaggacgtattctcaatcactggtcgtggtactgttgctacaggccgtgttgaacgtggtcaaatcaaagttggtgaagaagttgaaatcatcggtttacatgacacatctaaaacaactgttacaggtgttgaaatgttccgtaaattattagactacgctgaagctggtgacaacattggtgcattattacgtggtgttgctcgtgaagacgtacaacgtggtcaagtattagctgctcctggttcaattacaccacatactgaattcaaagcagaagtatacgtattatcaaaagacgaaggtggacgtcacactccattcttctc

SEQ ID NO: 179 - DNA, 704 bp, Staphylococcus aureus ATCC 43300
gttggtgtaccagcattagtagtattcttaaacaaagttgacatggttgacgatgaagaattattagaattagtagaaatggaagttcgtgacttattaagcgaatatgacttcccaggtgacgatgtacctgtaatcgctggttcagcattaaaagctttagaaggcgatgctcaatacgaagaaaaaatcttagaattaatggaagctgtagatacttacattccaactccagaacgtgattctgacaaaccattcatgatgccagttgaggacgtattctcaatcactggtcgtggtactgttgctacaggccgtgttgaacgtggtcaaatcaaagttggtgaagaagttgaaatcatcggtttacatgacacatctaaaacaactgttacaggtgttgaaatgttccgtaaattattagactacgctgaagctggtgacaacattggtgcattattacgtggtgttgctcgtgaagacgtacaacgtggtcaagtattagctgctcctggttcaattacaccacatactgaattcaaagcagaagtatacgtattatcaaaagacgaaggtggacgtcacactccattcttctcaaactatcgtccacaattctatttccgtactactgacgtaactggtgttgttcacttaccagaaggtactgaaatggtaatgcctggtgataacgttgaaatgac

SEQ ID NO: 180 - DNA, 730 bp, Staphylococcus aureus subsp. aureus ATCC 6538
gtgaacacattcttttatcacgtaacgttggtgtaccagcattagtagtattcttaaacaaagttgacatggttgacgatgaagaattattagaattagtagaaatggaagttcgtgacttattaagcgaatatgacttcccaggtgacgatgtacctgtaatcgctggttcagcattaaaagctttagaaggcgatgctcaatacgaagaaaaaatcttagaattaatggaagctgtagatacttacattccaactccagaacgtgattctgacaaaccattcatgatgccagttgaggacgtattctcaatcactggtcgtggtactgttgctacaggccgtgttgaacgtggtcaaatcaaagttggtgaagaagttgaaatcatcggtttacatgacacatctaaaacaactgttacaggtgttgaaatgttccgtaaattattagactacgctgaagctggtgacaacattggtgcattattacgtggtgttgctcgtgaagacgtacaacgtggtcaagtattagctgctcctggttcaattacaccacatactgaattcaaagcagaagtatacgtattatcaaaagacgaaggtggacgtcacactccattcttctcaaactatcgtccacaattctatttccgtactactgacgtaactggtgttgttcacttaccagaaggtactgaaatggtaatgcctggtgataacgttgaaatgac

SEQ ID NO: 181 - DNA, 834 bp, Staphylococcus auricularis ATCC 33753
cggtgcgatcttagttgtatctgcagctgatggtccaatgccacaaactcgtgaacacatcttattatcacgtaacgttggtgtaccagcattagttgtattcttaaacaaagttgaccaagttgacgacgaagaattattagaattagtagaaatggaagttcgtgacttattaagcgaatacgactacccaggtgacgatgtacctgtaatctctggttctgcgttgaaagcattagaaggcgacaaagaatacgaacaaaaaatcttagacttaatgcaacaagttgacgattacattccaactccagaacgtgactctgataaaccattcatgatgccagttgaagacgtattctcaatcactggtcgtggtactgttgcaacaggccgtgttgaacgtggtcaaatcaaagtcggtgaagaagttgaaatcatcggtatgaaagacggttcacaaaaaacaacagttactggtgtagaaatgttccgtaaattattagactacgctgaagctggtgacaacatcggtgctttattacgtggtatttcacgtgaagaagtacaacgtggtcaagttttagctgctcctggttcaattacaccacacactaaattcactgcagaagtttacgtattatctaaagatgaaggtggacgtcacactccattcttctctaactaccgtccacaattctatttccgtactactgacgtaacaggtgttgttactttaccagaaggtacagaaatggtaatgcctggcgataacgttaaaatggaagttgaattaatttctccaatcgctatcgaagacggtactcgtttctcaat

SEQ ID NO: 182 - DNA, 835 bp, Staphylococcus capitis subsp. capitis ATCC 27840
cggcggtatcttagtagtatctgctgctgacggtccaatgccacaaactcgtgaacacatcttattatcacgtaacgttggtgtaccagcattagttgtattcttaaacaaagttgacatggtagacgacgaagaattattagaattagttgaaatggaagttcgtgacttattaagcgaatatgacttcccaggtgatgatgtacctgtaatcgctggttcagcattaaaagctttagaaggcgatgctcaatacgaagaaaaaatcttagaattaatgcaagcagttgatgattacattccaactccagaacgtgattctgacaaaccattcatgatgccagttgaggacgtattctcaatcactggtcgtggtactgttgctacaggccgtgttgaacgtggtcaaatcaaagttggtgaagaagttgaaatcatcggtatccacgaaacttctaaaacaactgttactggtgtagaaatgttccgtaaattattagactacgctgaagctggtgacaacatcggtgctttattacgtggtgttgctcgtgaagacgtacaacgtggtcaagtattagctgctcctggttcaatcacaccacacactaaattcaaagcggaagtttacgttttatctaaagacgaaggtggacgtcacactccattcttcagtaactaccgcccacaattctatttccgtactactgacgtaactggtgttgttaacttaccagaaggtactgaaatggttatgcctggcgacaacgttgaaatgacagttgaattaatcgctcctatcgctattgaagacggtactcgtttctcaatcgga

SEQ ID NO: 183 - DNA, 804 bp, Macrococcus caseolyticus ATCC 13548
gtatcttagtagtatctgctgctgacggtccaatgccacaaactcgtgaacacatccttttatcacgtaacgttggtgtaccagcattagtagtattcttgaacaaagttgacatggttgacgatgaagaattattagaattagttgaaatggaagttcgtgacttattatctgaatatgacttccctggtgacgatgtacctgtaatcgctggatctgctttaaaagcattagaaggcgttgaagaatacgaagacaaaatcatggaattaatggacgcagttgatgagtacatcccaactccagaacgtgattctgacaaaccattcatgatgccagttgaggacgtattctcaatcactggtcgtggtacagttgcaactggacgtgttgagcgtggacaagttaaagttggtgaagaagttgaaatcattggtttaactgaagaaccagcaaaaactacagttacaggtgtagaaatgttccgtaaattattagattacgctgaagctggagataacatcggtgctttattacgtggtgtttctcgtgaagacgtacaacgtggacaagtattagctaaaccaggttcaattactccacatactaaattcaaagctgaagtttacgtattatctaaagaagaaggtggacgtcatactccattcttcactaactaccgccctcagttctacttccgtacaactgacgtaactggtgtagttaacttaccagaaggtactgaaatggtaatgcctggagataacatcgaaatgaacgttgaattaatttctccaatcgcga

SEQ ID NO: 184 - DNA, 832 bp, Staphylococcus cohnii DSM 20260
cggagctatcttagtagtatctgctgctgatggcccaatgccacaaactcgtgaacatatccttttatcacgtaacgttggtgttccagcattagttgtattcttaaacaaagttgacatggttgacgatgaagaattattagaattagtagaaatggaagttcgtgacttattaagcgaatatgacttcccaggtgacgatgtacctgtaatctctggttcagcattaaaagctcttgaaggcgacgctgactatgagcaaaaaatcttagacttaatgcaagctgttgatgacttcattccaacaccagaacgtgattctgacaaaccattcatgatgccagttgaggacgtattctcaatcactggtcgtggtactgttgctacagggcgtgttgaacgtggtcaaatcaaagtcggtgaagaagttgaaatcatcggtatgcaagaagattcaagcaaaacaactgttactggtgtagaaatgttccgtaaattattagactacgctgaagctggtgacaacattggtgcgttattacgtggtgttgcacgtgaagacatccaacgtggtcaagttttagctgctcctggttcaattacaccacacacaaactttaaagcggaagtttacgttttatcaaaagatgaaggtggccgtcatacgccattcttcagtaactatcgcccacaattctatttccgtactactgacgtaacaggtgttgttactttaccagaaggtactgaaatggttatgcctggcgacaacgtagaaatggaagttgaactaatttctccaatcgctatcgaagacggtacacgtttctct

SEQ ID NO: 185 - DNA, 699 bp, Staphylococcus epidermidis strain CSG 269
atctgctgctgacggtccaatgccacaaactcgtgaacacatcttattatcacgtaacgttggtgtaccagcattagttgtattcttaaacaaagttgacatggtagacgacgaagaattattagaattagttgaaatggaagttcgtgacttattaagcgaatatgacttcccaggtgacgatgtacctgtaatcgctggttctgcattaaaagcattagaaggcgatgctgaatacgaacaaaaaatcttagacttaatgcaagcagttgatgattacattccaactccagaacgtgattctgacaaaccattcatgatgccagttgaggacgtattctcaatcactggtcgtggtactgttgctacaggccgtgttgaacgtggtcaaatcaaagttggtgaagaagttgaaatcatcggtatgcacgaaacttctaaaacaactgttactggtgtagaaatgttccgtaaattattagactacgctgaagctggtgacaacatcggtgctttattacgtggtgttgcacgtgaagacgtacaacgtggtcaagtattagctgctcctggttctattacaccacacacaaaattcaaagctgaagtatacgtattatctaaagatgaaggtggacgtcacactccattcttcactaactatcgcccacaattctatttccgtactactgacgtaac

SEQ ID NO: 186 - DNA, 829 bp, Staphylococcus haemolyticus ATCC 29970
cggcggtatcttagtagtatctgctgctgacggtccaatgccacaaactcgtgaacacattcttttatcacgtaacgttggtgtaccagcattagtagtattcttaaataaagttgacatggttgacgatgaagaattattagaattagttgaaatggaagtacgtgacttattatctgaatacgacttcccaggtgacgatgtacctgtaatcgctggttcagcattaaaagctttagaaggcgatgctcaatacgaagaaaaaatcttagaattaatgcaagcagttgatgactacattccaactccagaacgtgattctgacaaaccattcatgatgccagttgaggacgtattctcaatcactggtcgtggtactgttgctacaggccgtgttgaacgtgggcaaatcaaagttggtgaagaagttgaaatcattggtatccatgacacttctaaaacaactgttactggtgtagaaatgttccgtaaattattagactacgctgaagctggtgacaacatcggtgcattattacgtggtgttgctcgtgaagacgtacaacgtggtcaagtattagctgctccaggttcaatcacacctcacacaaaatttaaagcagacgtatacgttttatctaaagacgaaggtggacgtcacactccattcttcacaaactatcgtccacaattctatttccgtactactgacgtaactggtgttgttaacttaccagaaggtactgaaatggttatgcctggcgacaacgttgaaatgacagtagaattaatcgctcctatcgcgattgaagacggtactcgtttctca

SEQ ID NO: 187 - DNA, 705 bp, Staphylococcus warneri strain CSG 123
cacaaactcgtgaacacattcttttatcacgtaacgttggtgtaccagctttagttgtattcttaaacaaagttgatatggtagacgacgaagaattattagaattagtagaaatggaagttcgtgacttattatctgaatatgacttcccaggtgacgacgtacctgtaatcgctggttcagcattaaaagctttagaaggcgacgaaaaatacgaagaaaaaatcttagaattaatgcaagcagttgatgactacattccaactccagaacgtgattctgacaaaccattcatgatgccagttgaggacgtattctcaatcactggtcgtggtactgttgctacaggccgtgttgaacgtggtcaaatcaaagttggtgaagaagttgaaatcatcggtttacatgacacttctaaaacaactgttactggtgtagaaatgttccgtaagttattagactacgctgaagctggtgacaacatcggtgctttattacgtggtgttgctcgtgaagacgtacaacgtggtcaagtattagctgctcctggttcaattacaccacatacaaaattcaaagcggaagtttacgttttatctaaagacgaaggtggacgtcacactccattcttcagtaactaccgcccacaattctatttccgtactactgacgtaactggcgttgttcaattaccagaaggtactg

SEQ ID NO: 188 - DNA, 678 bp, Staphylococcus haemolyticus strain CSG 23
ttttatcacgtaacgttggtgtaccagcattagtagtattcttaaacaaagttgacatggttgacgatgaagaattattagaattagttgaaatggaagtacgtgacttattatctgaatacgacttcccaggtgacgacgtacctgtaatcgctggttcagctttaaaagctttagaaggcgatgctcaatacgaagaaaaaatcttagaattaatgcaagcagttgatgattacattccaactccagaacgtgactctgataaaccattcatgatgccagttgaggacgtattctcaatcactggtcgtggtactgttgctacaggtcgtgttgaacgtggtcaaatcaaagttggtgaagaagttgaaattattggtatcaaagaaacttctaaaacaactgttactggtgtagaaatgttccgtaaattattagactacgctgaagctggtgacaacatcggtgctttattacgtggtgttgctcgtgaagatgtacaacgtggtcaagtattagctgctccaggttcaattacacctcacacaaaattcaaagcagacgtatacgttttatcaaaagatgaaggtggacgtcatactccattcttcactaactatcgtccacaattctatttccgtactactgacgtaactggtgttgttaacttaccagaag

SEQ ID NO: 189 - DNA, 668 bp, Staphylococcus haemolyticus strain CSG 33
accagcattagtagtattcttaaataaagttgacatggttgacgatgaagaattattagaattagttgaaatggaagtacgtgacttattatctgaatacgacttcccaggtgacgatgtacctgtaatcgctggttcagcattaaaagctttagaaggcgatgctcaatacgaagaaaaaatcttagaattaatgcaagcagttgatgactacattccaactccagaacgtgattctgacaaaccattcatgatgccagttgaggacgtattctcaatcactggtcgtggtactgttgctacaggccgtgttgaacgtggtcaaatcaaagttggtgaagaagttgaaatcattggtatccatgacacttctaaaacaactgttactggtgtagaaatgttccgtaaattattagactacgctgaagctggtgacaacatcggtgcattattacgtggtgttgctcgtgaagacgtacaacgtggtcaagtattagctgctccaggttcaatcacacctcacacaaaatttaaagcagacgtatacgttttatctaaagacgaaggtggacgtcacactccattcttcacaaactatcgtccacaattctatttccgtactactgacgtaactggtgttgttaacttaccagaaggtactgaaatgg

SEQ ID NO: 190 - DNA, 593 bp, Staphylococcus haemolyticus strain CSG 8
aaagttgacatggttgacgatgaagaattattagaattagttgaaatggaagtacgtgacttattatctgaatacgacttcccaggtgacgatgtacctgtaatcgctggttcagcattaaaagctttagaaggcgatgctcaatacgaagaaaaaatcttagaattaatgcaagcagttgatgattacattccaactccagaacgtgattctgacaaaccattcatgatgccagttgaggacgtattctcaatcactggtcgtggtactgttgctacaggccgtgttgaacgtggtcaaatcaaagttggtgaagaagttgaaatcattggtatccatgacacttctaaaacaactgttactggtgtagaaatgttccgtaaattattagactacgctgaagctggtgacaacattggtgcattattacgtggtgttgctcgtgaagacgtacaacgtggtcaagtattagctgctccaggttcaatcacacctcacacaaaatttaaagcagacgtatacgttttatctaaagacgaaggtggacgtcacactccattcttcacaaactatcgtccacaattctatttccg

SEQ ID NO: 191 - DNA, 828 bp, Staphylococcus hominis subsp. hominis ATCC 27844
cggcgctatcttagtagtatctgctgctgatggtccaatgccacaaactcgtgaacacattcttttatcacgtaacgttggtgtaccagcattagtagtattcttaaacaaagttgacatggttgacgatgaagaattattagaattagttgaaatggaagtacgtgacttattatctgaatacgacttcccaggtgacgacgtacctgtaatcgctggttcagctttaaaagctttagaaggcgatgctcaatacgaagaaaaaatcttagaattaatgcaagcagttgatgattatattccaactccagaacgtgactctgataaaccattcatgatgccagttgaggacgtattctcaatcactggtcgtggtactgttgctacaggccgtgttgaacgtggtcaaatcaaagttggtgaagaagttgaaattattggtatcaaagaaacttctaaaacaactgttactggtgtagaaatgttccgtaaattattagactacgctgaagctggtgacaacatcggtgctttattacgtggtgttgctcgtgaagatgtacaacgtggtcaagtattagctgctccaggttcaattacacctcacacaaaattcaaagcagacgtatacgttttatcaaaagatgaaggtggacgtcatactccattcttctctaactatcgtccacaattctatttccgtactactgacgtaactggtgttgttaacttaccagaaggtactgaaatggtaatgcctggtgacaacgttgaaatgacagtagaattaatcgctcctatcgcgattgaagacggtactcgtttctc

SEQ ID NO: 192 - DNA, 620 bp, Staphylococcus warneri ATCC 35982
atggtccaatgccacaaactcgtgaacacattcttttatcacgtaacgttggtgtaccagctttagttgtattcttaaacaaagttgatatggtagacgacgaagaattattagaattagtagaaatggaagttcgtgacttattatctgaatatgacttcccaggtgacgacgtacctgtaatcgctggttcagcattaaaagctttagaaggcgacgaaaaatacgaagaaaaaatcttagaattaatgcaagcagttgatgactacattccaactccagaacgtgattctgacaaaccattcatgatgccagttgaggacgtattctcaatcactggtcgtggtactgttgctacaggccgtgttgaacgtggtcaaatcaaagttggtgaagaagttgaaatcatcggtttacatgacacttctaaaacaactgttactggtgtagaaatgttccgtaagttattagactacgctgaagctggtgacaacatcggtgctttattacgtggtgttgctcgtgaagacgtacaacgtggtcaagtattagctgctcctggttcaattacaccacatacaaaattcaaagcggaagtttacgttttatctaaagacgaa

SEQ ID NO: 193 - DNA, 692 bp, Staphylococcus hominis strain CSG 170
ccagcattagtagtattcttaaacaaagttgacatggttgacgatgaagaattattagaattagttgaaatggaagtacgtgacttattatctgaatacgacttcccaggtgacgacgtacctgtaatcgctggttcagctttaaaagctttagaaggcgatgctcaatacgaagaaaaaatcttagaattaatgcaagcagttgatgattatattccaactccagaacgtgactctgataaaccattcatgatgccagttgaggacgtattctcaatcactggtcgtggtactgttgctacaggccgtgttgaacgtggtcaaatcaaagttggtgaagaagttgaaattattggtatcaaagaaacttctaaaacaactgttactggtgtagaaatgttccgtaaattattagactacgctgaagctggtgacaacatcggtgctttattacgtggtgttgctcgtgaagatgtacaacgtggtcaagtattagctgctccaggttcaattacacctcacacaaaattcaaagcagacgtatacgttttatcaaaagatgaaggtggacgtcatactccattcttctctaactatcgtccacaattctatttccgtactactgacgtaactggtgttgttaacttaccagaaggtactgaaatggtaatgcctggtgacaacgttgaaat

SEQ ID NO: 194 - DNA, 684 bp, Staphylococcus hominis strain CSG 36
cattcttttatcacgtaacgttggtgtaccagcattagtagtattcttaaacaaagttgacatggttgacgatgaagaattattagaattagttgaaatggaagtacgtgacttattatctgaatacgacttcccaggtgacgacgtacctgtaatcgctggttcagctttaaaagctttagaaggcgatgctcaatacgaagaaaaaatcttagaattaatgcaagcagttgatgattatattccaactccagaacgtgactctgataaaccattcatgatgccagttgaggacgtattctcaatcactggtcgtggtactgttgctacaggccgtgttgaacgtggtcaaatcaaagttggtgaagaagttgaaattattggtatcaaagaaacttctaaaacaactgttactggtgtagaaatgttccgtaaattattagactacgctgaagctggtgacaacatcggtgctttattacgtggtgttgctcgtgaagatgtacaacgtggtcaagtattagctgctccaggttcaattacacctcacacaaaattcaaagcagacgtatacgttttatcaaaagatgaaggtggacgtcatactccattcttctctaactatcgtccacaattctatttccgtactactgacgtaactggtgttgttaacttaccagaagg

SEQ ID NO: 195 - DNA, 685 bp, Staphylococcus hominis strain CSG 6
accagcattagtagtattcttaaacaaagttgacatggttgacgatgaagaattattagaattagttgaaatggaagtacgtgacttattatctgaatacgacttcccaggtgacgacgtacctgtaatcgctggttcagctttaaaagctttagaaggcgatgctcaatacgaagaaaaaatcttagaattaatgcaagcagttgatgattacattccaactccagaacgtgactctgataaaccattcatgatgccagttgaggacgtattctcaatcactggtcgtggtactgttgctacaggccgtgttgaacgtggtcaaatcaaagttggtgaagaagttgaaattattggtatcaaagaaacttctaaaacaactgttactggtgtagaaatgttccgtaaattattagactacgctgaagctggtgacaacatcggtgctttattacgtggtgttgctcgtgaagatgtacaacgtggtcaagtattagctgctccaggttcaattacacctcacacaaaattcaaagcagacgtatacgttttatcaaaagatgaaggtggacgtcatactccattcttcactaactatcgtccacaattctatttccgtactactgacgtaactggtgttgttaacttaccagaaggtactgaaatggtaatgcctggcgacaac

SEQ ID NO: 196 - DNA, 611 bp, Staphylococcus hominis strain CSG 62
gacttattatctgaatacgacttcccaggtgacgacgtacctgtaatcgctggttcagctttaaaagctttagaaggcgatgctcaatacgaagaaaaaatcttagaattaatgcaagcagttgatgattacattccaactccagaacgtgactctgataaaccattcatgatgccagttgaggacgtattctcaatcactggtcgtggtactgttgctacaggccgtgttgaacgtggtcaaatcaaagttggtgaagaagttgaaattattggtatcaaagatacttctaaaacaactgttactggtgtagaaatgttccgtaaattattagactacgctgaagctggtgacaacatcggtgctttattacgtggtgttgctcgtgaagatgtacaacgtggtcaagtattagctgctccaggttcaatcacacctcacacaaaattcaaagcagacgtatatgttttatcaaaagatgaaggtggacgtcatactccattcttcactaactatcgtccacaattctatttccgtactactgacgtaactggtgttgttaacttaccagaaggtactgaaatggtaatgcctggcgacaacgttgaaat

SEQ ID NO: 197 - DNA, 828 bp, Staphylococcus lugdunensis ATCC 43809
cggcggtatcttagtagtttctgctgcagatggtccaatgccacaaactcgtgaacacattcttttatcacgtaacgttggtgtgccagcattagtagtattcttaaacaaagttgacatggttgacgatgaagaattattagaattagtagaaatggaagttcgtgatttattaactgaatatgacttcccaggtgacgatgtgcctgtaatcgctggttcagcattaaaagctttagaaggcgacgaaaaatacgaagctaaaatcttagaattaatggatgcagttgataactacattccaactccagaacgtgactctgacaaaccattcatgatgccagttgaggacgtattctcaatcactggtcgtggtactgttgctacaggccgtgttgaacgtggtcaaatcaaagtcggtgaagaagttgaaattattggtatccacgatactactaaaacaactgttactggtgtagaaatgttccgtaaattattagactacgctgaagctggtgacaacatcggtgcgttattacgtggtgttgctcgtgaagatgtacaacgtggacaagtattagctgctccaggttcaattacacctcacactaaatttaaagctgacgtatatgttttatctaaagatgaaggtggacgtcatacaccattcttctcaaactaccgcccacaattctatttccgtactacagacgtaactggtgttgttaacttaccagaaggtacagaaatggttatgcctggcgacaacgttgaaatgacagttgaattaatcgctccaatcgctatcgaagacggaactcgtttctc

SEQ ID NO: 198 - DNA, 690 bp, Staphylococcus saprophyticus ATCC 35552
agtagtatctgctgctgatggcccaatgccacaaactcgtgaacacattcttttatcacgtaacgttggtgttccagcattagttgtattcttaaacaaagttgacatggttgacgatgaagaattattagaattagtagaaatggaagttcgtgacttattaagcgaatatgacttcccaggtgacgatgtacctgtaatctctggttctgcattaaaagctttagaaggcgacgctgactatgagcaaaaaatcttagacttaatgcaagctgttgatgacttcattccaacaccagaacgtgattctgacaaaccattcatgatgccagttgaggacgtattctcaatcactggtcgtggtactgttgctacaggccgtgttgaacgtggtcaaatcaaagtcggtgaagaaatcgaaatcatcggtatgcaagaagaatcaagcaaaacaactgttactggtgtagaaatgttccgtaaattattagactacgctgaagctggtgacaacattggtgcattattacgtggtgtttcacgtgatgacgtacaacgtggtcaagttttagctgctcctggtactattacaccacatacaaaattcaaagcggatgtttacgttttatctaaagatgaaggtggtcgtcatacaccattcttcactaactaccgcccacaattctattt

SEQ ID NO: 199 - DNA, 723 bp, Staphylococcus saprophyticus strain CSG 83
gcattagttgtattcttaaacaaagttgacatggttgacgatgaagaattattagaattagtagaaatggaagttcgtgatttattaagcgaatatgacttcccaggtgacgatgtacctgtaatctctggttctgcattaaaagctttagaaggcgacgctgactatgagcaaaaaatcttagacttaatgcaagctgttgatgacttcattccaacaccagaacgtgattctgacaaaccattcatgatgccagttgaggacgtattctcaatcactggtcgtggtactgttgctacaggccgtgttgaacgtggtcaaatcaaagtcggtgaagaaatcgaaatcatcggtatgcaagaagaatcaagcaaaacaactgttactggtgtagaaatgttccgtaaattattagactacgctgaagctggtgacaacattggtgcattattacgtggtgtttcacgtgatgacgtacaacgtggtcaagttttagctgctcctggtactattacaccacatacaaaattcaaagcggatgtttacgttttatctaaagatgaaggtggtcgtcatacaccattcttcactaactaccgcccacaattctatttccgtactactgacgtaactggtgttgttaacttaccagaaggtactgaaatggttatgcctggcgataacgttgaaatggatgttgaattaatttctccaatcgctatt

SEQ ID NO: 200 - DNA, 697 bp, Staphylococcus saprophyticus strain CSsa 18
cgttggtgttccagcattagttgtattcttaaacaaagttgacatggttgacgatgaagaattattagaattagtagaaatggaagttcgtgacttattaagcgaatatgacttcccaggtgacgatgtacctgtaatctctggttctgcattaaaagctttagaaggcgacgctgactatgagcaaaaaatcttagacttaatgcaagctgttgatgacttcattccaacaccagaacgtgattctgacaaaccattcatgatgccagttgaggacgtattctcaatcactggtcgtggtactgttgctacaggccgtgttgaacgtggtcaaatcaaagtcggtgaagaaatcgaaatcatcggtatgcaagaagaatcaagcaaaacaactgttactggtgtagaaatgttccgtaaattattagactacgctgaagctggtgacaacattggtgcattattacgtggtgtttcacgtgatgacgtacaacgtggtcaagttttagctgctcctggtactattacaccacatacaaaattcaaagcggatgtttacgttttatctaaagatgaaggtggtcgtcatacaccattcttcactaactaccgcccacaattctatttccgtactactgacgtaactggtgttgttaacttaccagaaggtactgaaatggttatgcctggcgataac

SEQ ID NO: 201 - DNA, 835 bp, Staphylococcus sciuri subsp. sciuri ATCC 29060
cggcggtatcttagtagtatctgctgctgacggtccaatgcctcaaactcgtgagcacattcttttatcacgtaacgtaggtgttcctgcattagtagtattcttaaacaaagttgacatggttgacgatgaagaattattagaattagttgaaatggaagttcgtgacttattatctgaatatgacttcccaggcgacgacgttcctgtaattgctggttcagcattaaaagcattagaaggcgacgaagcttacgaagacaaaatcatggaattaatggatgctgttgatacattcatcccaactccagaacgtgactctgacaaaccattcatgatgccagttgaggacgtattctcaatcactggtcgtggtactgttgctacaggccgtgttgaacgtggtcaaatcactgttggtgaagaagttgaaatcatcggtttaactgaagaatcttctaaaacaactgtaactggtgttgaaatgttccgtaaattattagacttcgctgaagctggagataacatcggtgcattattacgtggtgttgctcgtgaagacgttaaccgtggtcaagtattagctaaaccaggttcaatcacacctcacactaaattcaaagctgaagtttatgtattatctaaagacgaaggtggacgtcatactccattcttcacaaactaccgcccacaattctatttccgtactactgacgtaactggtgtagttaacttaccagaaggtactgaaatggttatgcctggcgacaacgttgaaatggacgttgaattaatttcaccaatcgctattgaagacggtatcgtttctcaatca

SEQ ID NO: 202 - DNA, 831 bp, Staphylococcus warneri ATCC 27836
cggcggtatcttagttgtatctgcagctgatggtccaatgccacaaactcgtgaacacattcttttatcacgtaacgttggtgtaccagctttagttgtattcttaaacaaagttgatatggtagacgacgaagaattattagaattagtagaaatggaagttcgtgacttattatctgaatatgacttcccaggtgacgacgtacctgtaatcgctggttcagcattaaaagctttagaaggcgacgaaaaatacgaagaaaaaatcttagaattaatgcaagcagttgatgactacattccaactccagaacgtgattctgacaaaccattcatgatgccagttgaggacgtattctcaatcactggtcgtggtactgttgctacaggccgtgttgaacgtggtcaaatcaaagttggtgaagaagttgaaatcatcggtttacatgacacttctaaaacaactgttactggtgtagaaatgttccgtaagttattagactacgctgaagctggtgacaacatcggtgctttattacgtggtgttgctcgtgaagacgtacaacgtggtcaagtattagctgctcctggttcaattacaccacatacaaaattcaaagcggaagtttacgttttatctaaagacgaaggtggacgtcacactccattcttcagtaactaccgcccacaattctatttccgtactactgacgtaactggcgttgttcaattaccagaaggtactgaaatggttatgcctggtgataacgttgaaatgacagtagaattaatcgctcctatcgcgattgaagacggtactcgtttctcaac

SEQ ID NO: 203 - DNA, 829 bp, Staphylococcus warneri strain CSG 50
cggcggtatcttagttgtatctgcagctgatggtccaatgccacaaactcgtgaacacattcttttatcacgtaacgttggtgtaccagctttagttgtattcttaaacaaagttgatatggtagacgacgaagaattattagaattagtagaaatggaagttcgtgacttattatctgaatatgacttcccaggtgacgacgtacctgtaatcgctggttcagcattaaaagctttagaaggcgacgaaaaatacgaagaaaaaatcttagaattaatgcaagcagttgatgactacattccaactccagaacgtgattctgacaaaccattcatgatgccagttgaggacgtattctcaatcactggtcgtggtactgttgctacaggccgtgttgaacgtggtcaaatcaaagttggtgaagaagttgaaatcatcggtttacatgacacttctaaaacaactgttactggtgtagaaatgttccgtaagttattagactacgctgaagctggtgacaacatcggtgctttattacgtggtgttgctcgtgaagacgtacaacgtggtcaagtattagctgctcctggttcaattacaccacatacaaaattcaaagcggaagtttacgttttatctaaagacgaaggtggacgtcacactccattcttcagtaactaccgcccacaattctatttccgtactactgacgtaactggcgttgttcaattaccagaaggtactgaaatggttatgcctggtgataacgttgaaatgacagtagaattaatcgctcctatcgcgattgaagacggtactcgtttctca

SEQ ID NO: 204 - DNA, 839 bp, Bifidobacterium longum ATCC 15707
tggcgctatcctcgttgtggccgccaccgacggcccgatggcccagactcgcgagcacgtgctgctcgcccgtcaggttggcgttccgaagatcctcgtcgccctgaacaagtgcgacatggtcgacgatgaagagctcatcgagctcgtcgaagaagaggtccgcgacctcctcgacgagaacggcttcgaccgtgactgcccggtcatccacacctccgcttacggtgctctgcacgacgacgctccggaccacgagaagtgggtccagtccgttaaggacctcatggacgctgtcgacgactacatcccgaccccggttcacgacctggacaagccgttcctgatgccgatcgaggacgtcttcaccatctccggccgtggtaccgttgtcaccggtcgtgtcgagcgtggccagctggccgtcaacaccccggtcgagatcgttggtatccgtccgacccagcagaccaccgtcacctccatcgagaccttccacaagaccatggacgcctgcgaggctggcgacaacaccggtctgcttctgcgtggtctcggccgtgacgatgtcgagcgtggccaggttgtggccaagccgggctccgtcaccccgcacaccaagttcgagggcgaagtctacgtgctgaccaaggacgaaggcggccgtcactcgccgttcttctccaactaccgtccgcagttctacttccgcaccaccgacgtcaccggcgtcatcgagctgccggaaggcgtcgagatggttcagccgggcgaccacgctaccttcaccgttgagctgattcagcccatcgctatggaggaaggcctgaccttcgctg

SEQ ID NO: 205 - DNA, 754 bp, Stenotrophomonas maltophilia strain CDC F3338
cggcgcgatcctggtgtgctcggccgctgacggcccgatgccgcagacccgtgagcacatcctgctgtcgcgccaggtcggcgtgccgtacatcgtcgtgttcctgaacaaggccgacatggtcgacgacgccgagctgctcgagctggtcgagatggaagtgcgcgaactgctgagcaagtacgagttcccgggcgacgacaccccgatcatcgccggttcggcccgcctggcgctggaaggcgaccagagcgacatcggcgtgccggccatcctgaagctggtcgacgcgctggacagctggattccggagccggagcgtgcgatcgacaagccgttcctgatgccggtggaagacgtgttctcgatctcgggccgcggcaccgtggtgaccggtcgtatcgagcgcggcgtgatcaaggttggcgacgaaatcgaaatcgtcggcatccgtccggtgcagaagaccaccgtgaccggcgttgaaatgttccgcaagctgctggaccagggtcaggcaggcgacaacgctggcctgctgctgcgcggcaccaagcgtgatgacgtcgagcgtggccaggtgctggccaagccgggcacgatcaagccgcacaccaagttcgaaggcgaagtgtacgtcctgtcgaaggacgagggcggccgccacaccccgttcttcaacggctaccgtccgcagttctacttccgcaccaccgacatcaccggcgccgctgcactgccggaaggcgtcgaa

SEQ ID NO: 206 - DNA, 835 bp, Streptococcus acidominimus ATCC 51726
tggtgctatccttgtagtagcttcaactgacggaccaatgccacaaactcgtgagcacatccttctttcacgtcaagttggtgttaaaaaccttatcgttttcatgaacaaagttgaccttgttgatgatgaagaattgcttgaattggttgaaatggaaatccgtgaccttctttcagaatacgatttcccaggtgatgatcttccagttgttcaaggttcagctcttaaagcgcttgaaggtgattcagcacaagaagatgttatcatggaattgatgtcaatcgttgacacatacattccagaaccagaacgtgatactgacaaaccattgcttcttccagtcgaggatgtattctcaatcactggacgtggtactgttgcttcaggacgtatcgaccgtggtactgttaaagttaatgacgaagttgaaatcgttggtatcaaagacgaaatctctaaagcagttgttactggtgttgaaatgttccgtaaacaacttgacgaaggtcttgctggagataacgttggtgttcttcttcgtggtgtacaacgtgatgaaatcgaacgtggtcaagttcttgctaaaccaggttcaatcaacccacacactaaattcaaaggtgaagtttacgttctttctaaagaagaaggtggacgtcacactccattcttcgataactaccgtcctcagttctacttccgtacaactgacgtaactggttcaatcaaattgccagaaggtactgaaatggtaatgcctggtgataacgtaactatcgaagttgagttgatccacccaatcgccgttgaacaaggtactactttctctatc

SEQ ID NO: 207 - DNA, 819 bp, Streptococcus agalactiae ATCC 12403
ctatccttgtagttgcttcaactgatggaccaatgccacaaactcgtgagcacatccttctttcacgtcaagttggtgttaaacaccttatcgtattcatgaacaaagttgaccttgttgatgatgaagaattgcttgaattggttgaaatggaaattcgtgaccttctttcagaatacgacttcccaggtgatgaccttccagttatccaaggttcagctcttaaagcacttgaaggcgacgaaaaatacgaagacatcatcatggaattgatgagcactgttgatgagtacattccagaaccagaacgtgatactgacaaacctttacttcttccagttgaagatgtattctcaatcactggacgtggtacagttgcttcaggacgtatcgaccgtggtactgttcgtgtcaacgacgaagttgaaatcgttggtattaaagaagatatccaaaaagcagttgttactggtgttgaaatgttccgtaaacaacttgacgaaggtcttgcaggggacaacgttggtgttcttcttcgtggtgttcaacgtgatgaaatcgaacgtggtcaagttcttgctaaaccaggttcaatcaacccacacactaaatttaaaggtgaagtttacatcctttctaaagaagaaggtggacgtcatactccattcttcaacaactaccgtccacaattctacttccgtacaactgacgtaacaggttcaatcgaacttccagcaggaacagaaatggttatgcctggtgataacgttactatcgaagttgaattgattcacccaatcgccgtagaacaaggtacta

SEQ ID NO: 208 - DNA, 819 bp, Streptococcus agalactiae ATCC 12973
ctatccttgtagttgcttcaactgatggaccaatgccacaaactcgtgagcacatccttctttcacgtcaagttggtgttaaacaccttatcgtattcatgaacaaagttgaccttgttgatgatgaagaattgcttgaattggttgaaatggaaattcgtgaccttctttcagaatacgacttcccaggtgatgaccttccagttatccaaggttcagctcttaaagcacttgaaggcgatgaaaaatacgaagacatcatcatggaattgatgagcactgttgatgagtacattccagaaccagaacgtgatactgacaaacctttacttcttccagtcgaagatgtattctcaatcactggacgtggtacagttgcttcaggacgtatcgaccgtggtactgttcgtgtcaacgacgaagttgaaatcgttggtattaaagaagatatccaaaaagcagttgttactggtgttgaaatgttccgtaaacaacttgacgaaggtcttgcaggggacaacgttggtgttcttcttcgtggtgttcaacgtgatgaaatcgaacgtggtcaagttcttgctaaaccaggttcaatcaacccacacactaaatttaaaggtgaagtttacatcctttctaaagaagaaggtggacgtcatactccattcttcaacaactaccgtccacaattctacttccgtacaactgacgtaacaggttcaatcgaacttccagcaggaacagaaatggttatgcctggtgataacgttactatcgaagttgaattgattcacccaatcgccgtagaacaaggtacta

SEQ ID NO: 209 - DNA, 822 bp, Streptococcus agalactiae ATCC 13813
agctatccttgtagttgcttcaactgatggaccaatgccacaaactcgtgagcacatccttctttcacgtcaagttggtgttaaacaccttatcgtattcatgaacaaagttgaccttgttgatgatgaagaattgcttgaattggttgaaatggaaattcgtgaccttctttcagaatacgacttcccaggtgatgaccttccagttatccaaggttcagctcttaaagcacttgaaggcgatgaaaaatacgaagacatcatcatggaattgatgagcactgttgatgagtacattccagaaccagaacgtgatactgacaaacctttacttcttccagtcgaagatgtattctcaatcactggacgtggtacagttgcttcaggacgtatcgaccgtggtactgttcgtgtcaacgacgaagttgaaatcgttggtattaaagaagatatccaaaaagcagttgttactggtgttgaaatgttccgtaaacaacttgacgaaggtcttgcaggggacaacgttggtgttcttcttcgtggtgttcaacgtgatgaaatcgaacgtggtcaagttcttgctaaaccaggttcaatcaacccacacactaaatttaaaggtgaagtttacatcctttctaaagaagaaggtggacgtcatactccattcttcaacaactaccgtccacaattctacttccgtacaactgacgtaacaggttcaatcgaacttccagcaggaacagaaatggttatgcctggtgataacgttactatcgaagttgaattgattcacccaatcgccgtagaacaaggtactac

SEQ ID NO: 210 - DNA, 825 bp, Streptococcus agalactiae strain CDCss-1073
cggagctatccttgtagttgcttcaactgatggaccaatgccacaaactcgtgagcacatccttctttcacgtcaagttggtgttaaacaccttatcgtattcatgaacaaagttgaccttgttgatgatgaagaattgcttgaattggttgaaatggaaattcgtgaccttctttcagaatacgacttcccaggtgatgaccttccagttatccaaggttcagctcttaaagcacttgaaggcgacgaaaaatacgaagacatcatcatggaattgatgagcactgttgatgagtacattccagaaccagaacgtgatactgacaaacctttacttcttccagttgaagatgtattctcaatcactggacgtggtacagttgcttcaggacgtatcgaccgtggtactgttcgtgtcaacgacgaagttgaaatcgttggtattaaagaagatatccaaaaagcagttgttactggtgttgaaatgttccgtaaacaacttgacgaaggtcttgcaggggacaacgttggtgttcttcttcgtggtgttcaacgtgatgaaatcgaacgtggtcaagttcttgctaaaccaggttcaatcaacccacacactaaatttaaaggtgaagtttacatcctttctaaagaagaaggtggacgtcatactccattcttcaacaactaccgtccacaattctacttccgtacaactgacgtaacaggttcaatcgaacttccagcaggaacagaaatggttatgcctggtgataacgttactatcgaagttgaattgattcacccaatcgccgtagaacaaggtactac

SEQ ID NO: 211 - DNA, 826 bp, Streptococcus anginosus ATCC 33397
ggagctatccttgtagtagcttcaactgacggaccaatgcctcaaactcgtgaacacatccttctttcacgccaagtaggtgttaaataccttatcgtcttcatgaataaagttgacttggttgacgatgaagaattgcttgaattggttgaaatggaaatccgtgaccttctttcagaatacgatttcccaggtgatgaaatcccagttatccaaggttcagctcttaaagctcttgaaggtgatgaaaaatatgaagacatcatcatggaattgatggatactgttgatgaatacattccagaaccagaacgtgacactgacaaaccattgcttcttccagttgaagatgtattctcaattactggacgtggtactgttgcttcaggacgtatcgaccgtggtactgttaaagtcaacgacgaagttgaaatcgttggtatccgtgatgaaatccaaaaagcagttgttactggtgttgaaatgttccgtaaacaattggacgaaggtcttgctggagataacgtaggggttcttcttcgtggtatccaacgtgacgaaatcgaacgtggacaagttcttgctaaaccaggttcaattcatccacacactaaattcaaaggtgaagtttacatccttactaaagaagaaggtggacgtcatactccattcttcaacaactaccgtcctcaattctacttccgtactacagacgttacaggttcaatcgaacttcctgcaggtactgaaatggtaatgcctggtgataacgtaacaatcgacgttgaattgatccacccaattgccgtagaacaaggaactacat

SEQ ID NO: 212 - DNA, 827 bp, Streptococcus bovis ATCC 33317
tggtgctatccttgtagtagcttctacagatggtccaatgccacaaacacgtgaacacatccttctttcacgtcaagttggtgttaaacaccttatcgtcttcatgaacaaagttgaccttgttgatgacgaagaattgcttgaattggttgaaatggaaatccgtgaccttctttcagaatatgatttcccaggtgatgaaatccctgtaatccaaggttcagctcttaaagcccttgaaggtgacactcactacgaagacatcatcatggaattgatgaacactgtagatgaatacattccagaaccaaaacgtgatactgacaaaccattgcttcttccagtcgaagacgtattctcaatcactggtcgtggtactgtagcatcaggacgtatcgaccgtggtactgttaaagtcaacgacgaagttgaaatcgttggtatccgtgacgacatccaaaaagctgttgttactggtgttgaaatgttccgtaaacaacttgatgaaggtatcgcaggggataacgttggtgttcttcttcgtggtatccaacgtgatgaaatcgaacgtggtcaagttcttgctaaaccaggttcaatccacccacacactaaattcaaaggtgaagtttacatccttactaaagaagaaggtggacgtcacactccattcttcaacaactaccgtcctcaattctacttccgtacaactgacgttacaggttcaatcgaacttccagcaggtactgaaatggtaatgcctggtgataacgttactatcgacgttgaattgattcacccaatcgccgttgaacaaggtactacat

SEQ ID NO: 213 - DNA, 821 bp, Streptococcus anginosus ATCC 27823
gctatcctcgtagtagcttcaactgatggaccaatgcctcaaactcgtgaacatatccttctttcacgtcaagtaggtgttaaataccttatcgtcttcatgaacaaagttgacttggttgacgatgaagaattgcttgaattggttgaaatggaaatccgtgaccttctttcagaatacgatttcccaggtgatgaaatcccagttatccaaggttcagctcttaaagctcttgaaggtgatgaaaaatatgaagacatcatcatggaattgatggatactgttgatgaatacattccagaaccagaacgtgacactgacaaaccacttcttcttccagtcgaagatgtattctcaatcactggacgtggtactgttgcttcaggacgtatcgaccgtggtactgttaaagtcaatgatgaagttgaaattgttggtattcgtgacgaaatccaaaaagcagttgttactggtgttgaaatgttccgtaaacaattggacgaaggtcttgctggagataacgtaggggttcttcttcgtggtatccaacgtgacgaaatcgaacgtggacaagttcttgctaaaccaggttcaattcatccacacactaaattcaaaggtgaagtttacatccttactaaagaagaaggtggacgtcatactccattcttcaacaactaccgtcctcaattctacttccgtactacagacgttacaggttcaatcgaacttcctgcaggtactgaaatggtaatgcctggtgataacgtaacaattgatgttgagttgatccacccaattgccgtagaacaaggaactac

SEQ ID NO: 214 - DNA, 821 bp, Streptococcus cricetus ATCC 19642
gctatccttgtagtagcttctacagacggaccaatgccacaaactcgtgaacacatcttgctttcacgccaagttggtgttaagagccttatcgtcttcatgaacaaggttgacttggttgacgatgaagaattgcttgaattggttgaaatggaaatccgtgatcttctttcagaatacgatttcccaggtgatgatatccctgttgttcaaggttcagctcttaaagcccttgaaggtgatacagctgccgaagacaagatcatggaattgatggacatcgttgatgactacattccagaaccaaaacgtgatactgataagccattgcttcttccagtcgaagacgtattctcaatcactggacgtggtactgttgcttcaggacgtatcgaccgtggtactgttaaggtcaatgacgaagttgaaatcgttggtatcaaggacgaaatccaaaaagcggttgttaccggagttgaaatgttccgtaaacaattggatgaaggtcttgcaggggataacgttggtgtgcttcttcgtggtatccaacgtgatgaaatcgaacgtggtcaagtattggctgcacctggttcaatccatccacacactaaattcaagggtgaagtttacatcctttctaaagatgaaggtggacgtcacactccattcttcaacaactaccgtccacagttctacttccgtacaactgacgtaactggttcaatcgaattgccagcaggtactgaaatggttatgcctggtgataacgttactatcgacgttgaattgatccacccaatcgctgttgaaaaaggtactac

SEQ ID NO: 215 - DNA, 821 bp, Streptococcus cristatus ATCC 51100
tatccttgtagtagcttcaactgacggaccaatgccacaaactcgtgagcacatccttctttcacgtcaggttggtgttaaacaccttatcgtcttcatgaacaagatcgacttggttgatgacgaagaattgcttgaattggttgaaatggaaatccgtgacctcttgtcagaatacgacttcccaggtgacgatcttccagttatccaaggttcagctcttaaagctcttgaaggtgatactaagtacgaagacatcatcatggaattgatgaacactgttgatgagtacatcccagaaccagaacgtgatactgacaaacctcttcttcttccagtcgaagacgtattctcaatcactggtcgtggtacagttgcttcaggacgtatcgaccgtggtactgttcgtgtcaacgatgaaatcgaaatcgttggtatcaaagaagaaatccaaaaagcagttgttactggtgttgaaatgttccgtaaacagcttgacgaaggtcttgcaggggacaacgtaggtgtacttcttcgtggtatccaacgtgatgaaatcgaacgtggtcaagttatcgctaaaccaggttcaatcaacccacacactaaattcaagggtgaagtttacatccttactaaagaagaaggtggacgtcacactccattcttcaacaactaccgtccacagttctacttccgtacaactgacgttacaggttcaatcgaacttccagcaggtactgaaatggtaatgcctggtgataacgtaactatcgacgttgagttgatccacccaatcgccgttgaacaaggtactcctt

SEQ ID NO: 216 - DNA, 792 bp, Streptococcus downei ATCC 33748
agtagcttctactgatggaccaatgccacaaactcgtgaacacatcttgctttcacgtcaggttggtgttaagaaccttatcgtcttcatgaacaaggttgacttggttgacgatgaagaattgcttgaattggttgaaatggaaatccgtgacctgctttcagaatacgatttcccaggtgatgatatccctgttgttcaaggttcagctcttaaggctcttgaaggtgatacagctgccgaagacaagatcatggaattgatggacatcgttgatgactacattccagaaccaaaacgtgatactgataagcctttgcttcttccagtcgaagatgtattctcaatcactggacgtggtactgtagcttcaggacgtatcgaccgtggtactgttaaggtcaacgacgaagttgaaatcgttggtatcaaggacgaaatccaaaaagcagttgttaccggagttgaaatgttccgtaaacaattggacgaaggtcttgcaggggataacgttggtgtgcttcttcgtggtatccaacgtgatgaaatcgaacgtggtcaagtgttggctgcgcctggttcgattcacccacacactaagtttaaaggtgaagtttacatcctttctaaagaagaaggtggacgtcatactccattctttaacaactaccgtccacagttctacttccgtacaactgacgtaactggttcaatcgaattgccagcgggtactgaaatggttatgcctggtgataacgttactatcgacgttgaattgatccacccaattgc

SEQ ID NO: 217 - DNA, 795 bp, Streptococcus dysgalactiae ATCC 43078
gtagttgcttcaacagacggaccaatgccacaaactcgtgagcacatcctcctttcacgtcaggttggtgttaaacaccttatcgtgttcatgaacaaaattgaccttgttgacgatgaagaattgcttgaattggttgaaatggaaatccgtgaccttctttcagaatacgatttcccaggtgatgaccttccagttatccaaggttcagctcttaaagctcttgaaggcgacactaaatttgaagacatcatcatggaattgatggatactgttgattcatacattccagaaccagaacgtgacactgacaaaccattgcttcttccagtcgaagacgtattctcaatcacaggtcgtggtacagttgcttcaggacgtatcgaccgtggtactgttcgtgtcaacgacgaaatcgaaatcgttggtatcaaagaagaaactaaaaaagctgttgttactggtgttgaaatgttccgtaaacaacttgacgaaggtcttgcaggagacaacgtaggtatccttcttcgtggtgttcaacgtgacgaaatcgaacgtggtcaagttattgctaaaccaggttcaatcaacccacacactaaattcaaaggtgaagtatatatcctttctaaagacgaaggtggacgtcacactccattcttcaacaactatcgtccacaattctacttccgtacaactgacgtaacaggttcaatcgaacttccagctggtacagaaatggttatgcctggtgataacgtgacaatcaacgttgagttgatccacccaatcgcc

SEQ ID NO: 218 - DNA, 828 bp, Streptococcus equi subsp. equi ATCC 9528
cggagctatccttgtagttgcttcaactgacggaccaatgccacaaactcgtgagcacatccttctttcacgtcaggttggtgttaagcaccttatcgtgttcatgaacaaggttgaccttgttgacgatgaagaattgcttgagcttgttgaaatggaaattcgtgaccttctttcagaatatgatttcccaggtgatgaccttccagttatccaaggttcagcgcttaaggctcttgaaggcgacagcaaatacgaagatatcatcatggaattgatggatactgttgattcatacattccagaaccagaacgtgacacagacaagccattgcttcttccagtcgaggacgtattctcaatcactggacgtggtactgttgcttcaggacgtatcgaccgcggtactgttcgtgttaacgacgaaatcgaaatcgttggtatcagagacgagatcaaaaaagcagttgttactggtgtcgaaatgttccgtaaacagcttgacgaaggtcttgcaggggacaacgttggtgttcttcttcgtggtgtacaacgtgatgaaatcgaacgtggtcaagttattgctaagccaggttctatcaacccacacactaaatttaaaggtgaagtatatatccttactaaagaagaaggtggacgtcacacaccattcttcaacaactatcgtccacaattctacttccgtactactgacgtaacaggttcaatcgagcttccagcaggtacagaaatggttatgcctggtgataacgtgactattgacgttgagttgatccacccaatcgccgtagaacaaggtactacatt

SEQ ID NO: 219 - DNA, 825 bp, Streptococcus ferus ATCC 33477
cggtgcaatccttgtagtagcttctacagatggaccaatgccacaaactcgtgagcacatccttctttcacgtcaggtaggtgttaaacaccttatcgtcttcatgaacaaagttgacttggttgacgatgaagaattgcttgaattggttgaaatggaaatccgtgacctgctttcagaatatgatttcccaggtgatgaccttccagttatccaaggttcagctcttaaagcgcttgaaggtgatactgctcaagaagatgttatcatggaattgatgaaaaccgttgatgagtacatcccagaaccagaacgtgatactgacaaaccattgcttcttccagtcgaagatgtattctcaatcacaggtcgtggtactgtagcttcaggacgtatcgatcgtggtactgtaagagtcaacgatgaagttgaaatcgttggtatcaaagacgaaatcactaaagcagttgttaccggtgttgaaatgttccgtaaacaattggacgaaggtcttgctggtgataacgttggtgtgcttctccgtggtgtgcaacgtgatgaaatcgaacgtggtcaagtattggctaaaccaggttcaatcaacccacacactaaatttaaaggtgaagtttacatccttactaaagaagaaggtggacgtcatacaccattcttcaacaactaccgtccacagttctacttccgtacaactgacgtaactggttcaatcgaattgccagcaggtactgaaatggttatgcctggtgataacgtgactatcgacgttgaattgatccacccaatcgccgttgaacaaggtactac

SEQ ID NO: 220 - DNA, 826 bp, Streptococcus gordonii ATCC 10558
cggagctatccttgtagtagcttcaactgatggtcctatgccacaaactcgtgagcacatccttctctcacgccaagttggtgttaaacacttgatcgtgttcatgaacaaagttgacttggttgacgatgaagaattgcttgagttggttgaaatggaaatccgtgacctcttgtcagaatacgacttcccaggtgacgatcttccagttatccaaggttcagctcttaaagctcttgaaggtgactctaaatatgaagatatcatcatggaattgatgaacactgttgatgagtacatcccagaaccagaacgcgacactgacaaaccattgcttcttccagtcgaagacgtattctcaatcactggacgtggtacagttgcttcaggacgtatcgaccgtggtatcgttaaagtcaatgacgaaatcgaaatcgttggtatcaaagaagaaatccaaaaagcagttgttactggtgttgaaatgttccgtaaacagcttgacgaaggtcttgcaggggacaacgttggtgtgcttcttcgtggtatccaacgtgatgaaatcgaacgtggacaagttattgctaaaccaggttcaatcaacccacacactaaattcaaaggtgaagtttatatccttactaaagaagaaggtggacgtcacactccattcttcaacaactaccgtccacagttctacttccgtacaactgacgttacaggttcaatcgaacttccagcaggtactgaaatggtaatgcctggtgataacgtaactatcgacgttgagttgatccacccaatcgccgttgaacaaggtactact

SEQ ID NO: 221 - DNA, 799 bp, Streptococcus anginosus ATCC 27335
tgtagtagcttcaactgacggaccaatgcctcaaactcgtgaacatatccttctttcacgtcaagtaggtgttaaataccttattgtcttcatgaacaaagttgacttggttgacgatgaagaattgcttgaattggttgaaatggaaatccgtgatcttctttcagaatacgatttcccaggtgatgatattccagtaatccaaggttcagcacttaaagctcttgaaggtgatgaaaaatatgaagacatcatcatggaattgatgaatactgttgatgaatatattccagaaccagaacgtgatactgacaaaccattgcttcttccagtcgaagatgtattctcaatcactggacgtggtactgttgcttcaggacgtatcgaccgtggtactgttaaagtcaacgatgaagttgaaatcgttggtatccgcgaggaaatccaaaaagcagttgttactggtgttgaaatgttccgtaaacaattggacgaaggtcttgctggagataacgtaggggttcttcttcgtggtatccaacgtgacgaaattgaacgtggacaagttcttgctaaaccaggttcaattcatccacacactaaattcaaaggtgaagtttacatccttactaaagaagaaggtggacgtcatactccattcttcaacaactaccgtcctcaattctacttccgtactacagacgttacaggttcaatcgaacttcctgcaggtactgaaatggtaatgcctggtgataacgtaacaattgatgttgagttgatccacccaattgccgta

SEQ ID NO: 222 - DNA, 825 bp, Streptococcus macacae ATCC 35911
tggtgctattcttgtagtagcttcaactgacggtccaatgcctcaaacgcgtgaacatatccttctttcacgccaagtaggtgttaaaaaccttattgttttcatgaataaagttgacttagttgatgatgaagaattgcttgaattggttgaaatggaaatccgtgatcttcttacagaatatgatttcccaggcgatgaacttccagttatccaaggttcagcacttaaagctcttgaaggtgatactaagtacgaagatattatcatggaattgttggatactgtagatgattacatcccagaaccacaacgtgatactgacaagccattgcttcttccagtcgaagatgttttctctattactggacgtggtactgttgcttcaggacgtattgaccgtggtactgttaaggttaatgatgaagttgaaatcgttggtattcgtgacgatattcaaaaagcagttgttactggtgttgaaatgttccgtaaacagcttgacgaaggtcttgctggtgataacgtcggtgtccttcttcgtggtatccaacgtgatgaaattgaacgcggtcaagttcttgctaaaccaggatcaattcatccacatactaaattcaaaggtgaagtttatattcttactaaagaagaaggtggacgtcatactccattctttaacaactaccgtccacagttctacttccgtacaactgatgtaactggttcaattgatttgccagcaggtactgaaatggttatgcctggtgataatgttacgattgatgttgaactgatccacccaatcgctgttgaacaaggtacaac

SEQ ID NO: 223 - DNA, 822 bp, Streptococcus gordonii ATCC 33399
ctatccttgtagtagcttcaactgacggaccaatgccacaaactcgtgagcacatccttctttcacgtcaggttggtgttaaacaccttatcgtcttcatgaacaaagttgacttggttgacgacgaagaattgcttgaattggttgaaatggaaatccgtgacctattgtcagaatacgacttcccaggtgacgatcttccagttatccaaggttcagctcttaaagcccttgaaggtgacactaaatacgaagacatcgttatggaattgatgaacacagttgatgagtacatcccagaaccagaacgtgacactgacaaaccattgcttcttccagtcgaagacgtattctcaatcactggtcgtggtacagttgcttcaggacgtatcgaccgtggtatcgttaaagtcaacgacgaaatcgaaatcgttggtatcaaagaagaaactcaaaaagcagttgttactggtgttgaaatgttccgtaaacaacttgacgaaggtcttgccggagataatgtaggtgtccttcttcgtggtgttcaacgtgatgaaatcgaacgtggacaagttattgctaaaccaggttcaatcaacccacacactaaattcaaaggtgaagtttacatccttactaaagaagaaggtggacgtcacactccattcttcaacaactaccgtccacaattctacttccgtactactgacgttacaggttcaatcgaacttccagcaggtactgaaatggtaatgcctggtgataacgtgacaatcgacgttgagttgatccacccaatcgccgtagaacaaggtactacat

SEQ ID NO: 224 - DNA, 827 bp, Streptococcus mutans ATCC 25175
ccctggtgctatccttgtagtagcttcaactgatggaccaatgccacaaactcgtgaacacattcttctttcacgtcaagttggtgttaaatacctcattgtcttcatgaataaagttgatttggttgacgatgaagaattgcttgaattggttgaaatggaaatccgtgatcttctttcagaatatgatttcccaggtgatgatattccagttattcaaggttcagctcttaaagctcttgaaggcgatactgctcaagaagatatcatcatggaattaatgcatactgttgatgactacattccagatccagaacgtgatactgacaagccgctccttcttccagtcgaagatgttttctcaatcactggtcgtggtactgttgcttcaggacgtattgatcgtggtactgttaaagttaacgatgaagttgaaatcgttggtatccgtgatgacattcaaaaagctgttgttactggtgttgaaatgttccgtaaacaattggatgaaggtattgcaggggataatgttggtgttctccttcgtggtatccaacgtgatgaaatcgaacgtggtcaagttcttgctaaaccaggttcaattcacccacatactaaattcaaaggtgaagtttatatccttactaaagaggaaggtggacgtcatacaccattcttcaataactatcgtccacaattctacttccgtacaactgacgtaactggttcaattgagttgccagcaggtactgaaatggttatgcctggtgataacgttactattgacgttgaattgatccatccaatcgctgttgaacaaggtacta

SEQ ID NO: 225 - DNA, 824 bp, Streptococcus parasanguinis ATCC 15912
agctatccttgtagtagcttcaactgacggaccaatgccacaaacacgtgaacacatccttctttcacgtcaggttggtgttaaacacttgatcgtcttcatgaacaaagttgacttggttgatgatgaagaattgcttgaattggttgaaatggaaatccgtgaccttctttcagaatacgatttcccaggtgatgaccttccagttatccaaggttcagctcttaaagctcttgaaggtgactctaaatatgaagatatcatcatggaattgatggatactgttgatgagtacatcccagaaccagaacgcgatactgacaaaccattgcttcttccagtcgaagacgtattctcaatcactggacgtggtacagttgcttcaggacgtatcgaccgtggtgttgttcgtgtcaatgatgaaatcgaaatcgttggtatcaaagaagaaatccaaaaagcagttgttactggtgttgaaatgttccgtaaacaacttgacgaaggtcttgcaggggataacgttggtgtgcttcttcgtggtatccaacgtgatgaaatcgaacgtggacaagttatcgctaaaccaggttcaatcaacccacacactaaattcaaaggtgaagtttacatccttactaaagaagaaggtggacgtcatactccattcttcaacaactaccgtccacagttctacttccgtacaactgacgtaactggatctatcgaacttccaccaggaactgaaatggtaatgcctggtgataacgtgactatcgacgttgagttgatccacccaatcgccgttgaacaaggtactacat

SEQ ID NO: 226 - DNA, 824 bp, Streptococcus ratti ATCC 19645
tggtgctatccttgtagtagcttcaactgatggaccaatgccgcaaactcgtgaacacatcttgctttcacgtcaagttggtgttaaataccttatcgtcttcatgaacaaggttgacttggttgatgatgaagaattgcttgaattggttgaaatggaaatccgtgatcttctttcagaatacgatttcccaggtgatgacattccagttatccaaggttcagcccttaaagctcttgaaggtgacactgaacaagaagatgttatcatggaattgatgaaaacagttgatgagtacatcccagatccagaacgcgatactgataagccattgcttcttccagtcgaagacgtgttctcaatcactggacgtggtactgttgcatcaggacgtatcgaccgtggtactgttaaagtcaatgacgaagttgaaatcgttggtatccgtgatgacatccaaaaagctgttgttactggtgttgaaatgttccgtaaacagcttgacgaaggtcttgctggtgataacgttggtgtacttcttcgtggtatccaacgtgatgaaatcgaacgcggtcaagttcttgctaaaccaggttcaattcatccgcatactaaatttaaaggtgaagtttacatccttactaaagaagaaggcggacgtcacactccattcttcaacaactaccgtccacagttctacttccgtacaactgacgtaactggttcaatcgaattgccagcaggtactgaaatggttatgcctggtgataacgtgactatcgacgttgaattgatccacccaatcgctgttgaacaaggtacta

SEQ ID NO: 227 - DNA, 795 bp, Streptococcus sanguinis ATCC 10556
tgtagtagcttcaactgacggaccaatgccacaaactcgtgagcacatcttgctttcacgtcaggttggtgttaaacacttgatcgtcttcatgaacaaagttgacttggttgacgatgaagaattgcttgaattggttgaaatggaaatccgtgacctcttgtcagaatacgacttcccaggtgacgatcttccagttatccaaggttcagctcttaaagctcttgaaggtgactctaaatatgaagacatcatcatggaattgatggacactgttgatgagtacatcccagaaccagaacgcgatactgacaagccattgcttcttccagtcgaagacgtattctcaatcactggtcgtggtacagttgcttcaggacgtatcgaccgtggtatcgttaaagtcaacgacgaaatcgaaatcgttggtatcaaagaagaaatccaaaaagcagttgttactggtgttgaaatgttccgtaaacagcttgacgaaggtcttgcaggggacaacgtaggtgtgcttctccgtggtatccaacgtgatgaaatcgaacgtggacaagttatcgctaaaccaggttcaatcaacccacacactaaattcaagggtgaagtttatatccttactaaagaagaaggcggacgtcacactccattcttcaacaactaccgtccacagttctacttccgtacaactgacgttacaggttcaatcgaacttccagcaggtactgaaatggtaatgcctggtgataacgtaacaatcgacgttgagttgatccacccaatcgc

SEQ ID NO: 228 - DNA, 795 bp, Streptococcus sobrinus ATCC 33478
tgtagtagcttctactgacggaccaatgccacaaactcgtgaacacatcttgctttcacgccaagttggtgttaagaacctcatcgtcttcatgaacaaggttgacttggttgatgatgaagaattgcttgaattggttgaaatggaaatccgtgatcttctttcagaatacgatttcccaggtgacgacattcctgttgttcaaggttcagctcttaaggctcttgaaggtgatacagctgccgaagacaagattatggaattgatggacatcgttgatgattacattccagaaccaaaacgcgatactgataagccattgcttctcccagtcgaagacgtattctcaatcactggtcgtggtactgttgcttcaggacgtattgaccgtggtactgttaaggttaacgacgaagttgaaatcgttggtatccgtgacgatatccaaaaagcagttgttactggagttgaaatgttccgtaagcaattggacgaaggtcttgctggagataacgttggtgtgcttcttcgtggtatccaacgtgatgaaattgaacgtggtcaagtattggctgcacctggttcaatccacccacacactaagttcaagggtgaagtttacatcctttctaaagatgaaggtggacgtcacactccattcttcaacaactaccgtccacagttctacttccgtacaactgacgtaactggttcaatcgaattgccagcaggtactgaaatggttatgcctggtgataacgttactatcgacgttgaattgatccacccaatcgc

SEQ ID NO: 229 - DNA, 797 bp, Streptococcus suis ATCC 43765
tgtagtagcttcaactgacggtccaatgccacaaactcgtgagcacatccttctttcacgtcaggttggtgttaaacaccttatcgtcttcatgaacaaagttgacttggttgacgatgaagaattgcttgagttggttgaaatggaaatccgtgaccttctttcagaatacgatttcccaggtgatgatcttccagttatccaaggttcagctcttaaagctcttgaaggtgactctaagtacgaagacatcgttatggaattgatgaacactgttgatgagtacattccagaaccagaacgcgacactgacaaaccattgttgcttccagtcgaggacgtattctcaatcactggtcgtggtactgtagcttcaggacgtatcgaccgtggtactgttcgtgtcaacgacgaaatcgaaatcgttggtcttcaagaagaaaaatctaaagcagttgttactggtgttgaaatgttccgtaaacaacttgacgaaggtcttgccggcgataacgttggtgtgcttcttcgtggtgtacaacgtgatgaaatcgaacgtggtcaagttatctctaaaccaggttctatcaacccacacactaaattcaaaggtgaagtttacatccttactaaagaagaaggtggacgtcacactccattcttcgacaactaccgtccacagttctacttccgtacaactgacgtaactggttcaatcaaattgccagaaggtactgaaatggtaatgcctggtgataacgttactatcgacgttgaattgatccacccaatcgccg

SEQ ID NO: 230 - DNA, 793 bp, Streptococcus uberis ATCC 19436
ttgttgttgcatcaactgatggaccaatgccacaaactcgtgagcacatccttctttcacgccaagttggtgttaaacaccttatcgttttcatgaacaaaatcgaccttgttgacgatgaagaattgcttgaattagttgaaatggaaatccgtgaccttctttcagaatacgatttcccaggtgatgacctaccagttatccaaggttcagctcttaaagctcttgaaggtgattctaaatacgaagacatcatcatggaattgatgaaaactgttgatgagtatattccagaaccagaacgtgatacagacaaaccattacttcttccagtcgaagacgtattctcaatcacaggtcgtggtactgtagcttcaggacgtatcgatcgtggtactgttcgtgtcaacgacgaaattgaaatcgttggtatcaaagaagaaactaaaaaagcagttgttactggtgttgaaatgttccgtaaacaacttgacgaaggtcttgcaggagataacgtaggtatccttcttcgtggtgttcaacgtgacgaaatcgaacgtggacaagttattgctaaaccaggttcaatcaacccacacactaaattcaaaggtgaagtttacatcctttctaaagatgaaggtggacgtcatactccattcttcaacaactaccgtcctcaattctatttccgtacaactgacgtaacaggttcaatcgaacttccagctggtactgaaatggtaatgcctggtgataacgtgacaatcagcgttgagttgatccacccaat

SEQ ID NO: 231 - DNA, 798 bp, Streptococcus vestibularis ATCC 49124
ttgtagtagcatctactgacggaccaatgccacaaactcgtgagcacatccttctttcacgtcaggttggtgttaaacaccttatcgtcttcatgaacaaagttgacttggttgacgatgaagaattgcttgaattggttgaaatggaaatccgtgaccttctttcagaatacgatttcccaggtgatgatattccagttatccaaggttcagctcttaaagctcttgaaggtgattctaaatacgaagacatcatcatggacttgatgaacactgttgacgaatacattccagaaccagaacgtgacactgacaaaccattgttgcttccagtcgaagacgtattctcaatcactggtcgtggtactgttgcttcaggacgtatcgaccgtggtgttgttcgtgttaatgacgaagttgaaatcgttggtcttaaagaagaaatccaaaaagcagttgttactggtgtagaaatgttccgtaaacaacttgacgaaggtattgccggagataacgtcggtgtccttcttcgtggtatccaacgtgatgaaattgaacgtggtcaagtattggctgcacctggttcaatcaacccacacactaaattcaaaggtgaagtttacatcctttctaaagaagaaggtggacgtcacactccattcttcaacaactaccgtccacagttctacttccgtacaactgacgtaacaggttcaatcgaacttcctgcaggtactgaaatggttatgcctggtgataacgtgactatcgacgttgagttgatccacccaatcgccg

SEQ ID NO: 232 - DNA, 829 bp, Tatumella ptyseos ATCC 33301
ggcgctatcctggttgttgctgcaactgacggccctatgcctcagacccgtgagcacatcctgctgggccgccaggtaggcgttccttacatcatcgtgttcctgaacaaatgtgacatggttgatgatgaagagctgctggaactggtagaaatggaagtccgtgacctgctgtcacagtacgacttcccgggtgacgacacgccaatcgttcgcggttcagcgctgaaagcactggaaggtgaaggcgagtgggaagagaagattctggagctggctggcttcctggattcttacatccctgagccagagcgtgctatcgatcagccgttcctgctgccaatcgaagacgtattctcaatctccggtcgtggtacagttgttaccggtcgtgtagagcgcgggatcatcaaagtcggtgaagaagttgagatcgttggtatcaaagatactgcgaaatcaacctgtaccggtgttgaaatgttccgtaaactgctggaccagggtcaggcgggtgagaacgttggtgttctgctgcgtggtatcaagcgtgaagagatcgaacgtggtcaggttctggctaaaccaggttcaatcaaaccacacacccagttcgagtcagaagtttatattctgtctaaagacgaaggcggccgtcatactccgttcttcaaaggctaccgtccacagttctacttccgtacaactgacgtgaccggaaccatcgaactgccggaaggcgtagagatggtaatgcctggtgacaacatcaaaatggttgttaccctgatccatccaatcgcgatggacgatggtctgcgtttcgcaa

SEQ ID NO: 233 - DNA, 829 bp, Trabulsiella guamensis ATCC 49490
ggcgcaatcctggtagtagcagcgactgacggcccgatgccgcagactcgtgagcacatcctgctgggtcgtcaggtaggcgttccgtacatcatcgtgttcctgaacaaatgcgacatggttgatgacgaagagctgctggaactggtagagatggaagttcgtgaactgctgtctcagtacgatttcccgggcgatgacacgccgatcgtacgtggttctgctctgaaagcgctggaaggcgacgcagagtgggaagcgaaaatcatcgaactggcaggtttcctggattcttacattccggaaccagagcgtgcgattgacaagccgttcctgctgccgatcgaagacgtattctccatctctggtcgtggtaccgttgttaccggtcgtgtagagcgcggtatcatcaaagtgggtgaagaagtagaaatcgttggtatcaaagagactgcgaagtcaacctgtactggcgtagaaatgttccgcaaactgctggacgaaggccgtgctggtgagaacgtaggtgttctgctgcgtggtatcaaacgtgaagaaatcgaacgtggtcaggtactggctaagccgggcaccatcaacccgcacaccaagttcgaatctgaagtgtacattctgtccaaagacgaaggcggccgtcacactccgttcttcaaaggctaccgtccgcagttctacttccgtacaactgacgtgactggcaccatcgaactgccggaaggcgtagagatggtaatgccgggcgacaacatcaaaatggttgttaccctgatccacccgatcgcgatggacgacggtctgcgtttcgcaa

SEQ ID NO: 234 - DNA, 825 bp, Veillonella parvula ATCC 10790
cggcgctatcttggttgtatccgcagctgacggccctatgcctcaaactcgcgaacacatcttgttggctcgccaagttggtgttcctgcaatcgtagtattcttgaacaaagctgacatggttgacgatgaagaattgatcgaattggtagaaatggaagttcgtgaacttctttcttcctacgaattccctggcgacgaagtacctatcgttgtaggttccgcgttgaaagctttggaaggcgatgctcaatatgtagctaaaattgacgaattgatggacgctgtagactcctacatcccaacaccagttcgtgacactgataaaccattcttgatgcctgtggaagatgttttcacaatcactggtcgtggtacagtagcaactggccgtgttgaacgtggtcaagtaaacgttggtgatactgttgaagtagtaggcttgaaagaaaaagctgaacaatacgtagtaacaggtcttgaaatgttccgtaaagtgttggattctgcagtagcaggtgacaacgtaggtgcattgcttcgtggtgttgatcgtaaagacatygaacgtggtcaagtattggctaaaccaggttccatcaacccacayacaaaattcaaagcagaagtatacgtattgactaaagaagaaggtggtcgtcatactccattcttctccaactaccgtccacaattctacttccgtacaacagacgtaacaggtgttgtaaaccttcctgaaggtgtagaaatgtgtatgcctggcgataacgtaacaatggaaatcgaattgattactccaatcgctatcgaagaaggtcttcg

SEQ ID NO: 235 - DNA, 825 bp, Yersinia enterocolitica ATCC 9610
cgctatcctggttgttgctgcaactgatggcccaatgccacagactcgtgagcacatcctgttgggtcgtcaggttggtgttccttacatcatcgtattcatgaacaaatgtgacatggttgacgatgaagagctgctagaactggtagaaatggaagtgcgcgatcttctgtctacctacgatttcccaggcgatgatacgccagttgttcgtggttccgcgctgaaagcattggaaggcgaacctgagtgggaagcaaaaattatcgaactggctggctacctggattcttacatcccagaaccagagcgtgctatcgataagccgttcctgctgccaatcgaagacgtattctctatctctggtcgtggtactgttgtaacgggtcgtgtagagcgcggtatcgttaaagttggtgaagaagtcgaaattgttggcctgaaagataccgttaaatctacttgtactggcgttgaaatgttccgcaaactgctggatgaaggccgtgcaggtgagaacgttggtgttctgctgcgtggtatcaagcgtgaagatatcgaacgtggtcaagttcttgctaaaccaggttcgattaaaccacacaccaaatttgaatcagaagtttatattctgagcaaagatgaaggtggtcgccatactccgttcttcaaaggctaccgtcctcagttctacttccgtacaactgatgtaaccggtactattgaactgccagaaggcgttgagatggtgatgccaggtgataacattcaaatgattgttaacctgattgctcctatcgcaatggatgacggcttgcgctttgc

SEQ ID NO: 236 - DNA, 828 bp, Yersinia frederiksenii ATCC 33641
ggcgcgatcctggttgttgctgccactgatggcccgatgccacagactcgcgagcacattctgttagggcgtcaggtgggtgttccttacatcctggtcttcctgaacaaatgtgacatggttgacgacgaagagctgctggaactggtagaaatggaagttcgtgaacttctgtctcagtacgatttccctggcgacgacactccagttatccgtggttctgcgctgaaagcgctggaaggcgaagctgagtgggaagcaaaaatcatcgaattggctgaggcgctggatagctatattccacagccagagcgtgcgattgataaaccattcctgctgccaatcgaagacgtattctcaatctctggccgtggtactgttgtcaccggtcgtgtagagcgcggtatcgttaaagtcggcgaagaagtcgaaatcgttggtatcattgataccatcaagactacctgtactggtgttgaaatgttccgcaaattgctggacgaaggccgtgcgggtgagaacgttggtgttctgctacgtggtactaaacgtgatgacgtacaacgtggtcaggtattggcaaaaccaggttctatcaagccacacaccaaatttgaatcagaagtttatattctgagcaaagatgaaggtggtcgccatactccgttcttcaaaggttatcgtcctcagttctacttccgtacaactgacgtgaccggtactatcgaactgccagaaggcgttgagatggtgatgccaggtgataacattcaaatgattgttaacctgattgctcctatcgcaatggatgacggtctgcgctttgcg

SEQ ID NO: 237 - DNA, 813 bp, Yersinia intermedia ATCC 29909
cttggttgtcgctgcaactgatggtcctatgccacagactcgcgagcacatcctgctaggtcgtcaggtgggtgttccttacatcctggtcttcctgaacaagtgtgacatggttgacgatgaggagttgctggaattggtagaaatggaagtccgcgaacttctgtctcaatatgatttccctggcgatgatactcctgttatccgtggttcagcgctgaaggcgttggaaggcgagcctgaatgggaagcaaaaattatcgaattagctgaggcgctggatagttatattccacagccagagcgcgcgattgatagaccattcttgctgccaatcgaagacgtattctctatctcaggtcgtggtacagtcgtcactggtcgtgtagagcgtgggatcgttaaagttggcgaagaagttgaaatcgttggtattatcgattccattagaacaacatgtactggcgttgaaatgttccgcaaattgctggacgaaggccgcgcgggtgagaacgttggtgttctactgcgtgggactaaacgtgatgacgtacagcgtggtcaggtattagctaagccaggttctatcaagccacatactaaattcgaatccgaagtttatattctgagcaaagatgaaggcgggcgtcacacgccgttcttcaaaggctaccgtcctcagttctacttccgtacaacggatgtaaccggtactattgaattgccagacggcgttgagatggtgatgccaggtgataacattcaaatgattgttaacctgattgcacctattgcgatggatgatggtctgcg

SEQ ID NO: 238 - DNA, 829 bp, Yersinia pestis strain KIM D27
ggagcgatcttggttgttgctgcaaccgatggccctatgccgcagactcgtgagcatatcctgctgggccgccaggttggtgtcccatacattattgtcttcctgaacaaatgtgacatggttgacgatgaagagttgctagagttggttgaaatggaggttcgtgagcttctgtctcaatacgatttcccaggcgacgacactccagtcatccgtggttcagcgttgaaagccctggaaggtgacgctgagtgggaagctaaaattatcgagttggcagaagctctggatagctatattccgcaaccagaacgcgctattgatagaccattcctattgccaattgaagacgtattctctatttctggtcgtggtactgtagttactggtcgtgtagaacgtggtattgttaaggtcggcgaagaagttgaaatcgttggtattatcgatacgattaaaacaacttgtactggcgttgaaatgttccgcaagctgctggatgaaggccgtgctggtgaaaatgttggtgttctgctgcgtggtactaagcgtgacgatgttcagcgtggtcaagtactggcgaaaccaggttctatcaagccacacacgaagtttgagtcagaagtttatattctgagcaaagatgaaggcggccgtcatacaccgttcttcaagggctaccgtcctcagttctacttccgtacaactgacgtgaccggtaccattgagctgccagaaggcgttgaaatggtcatgcctggtgacaacgtaaacatggttgttaacctaattgctcctatcgcaatggatgatggtctgcgcttcgcaa

SEQ ID NO: 239 - DNA, 817 bp, Yersinia pseudotuberculosis ATCC 29833
tggagcgatcttggttgttgctgcaaccgatggccctatgccgcagactcgtgagcatatcctgctgggccgccaggttggtgtcccatacattattgtcttcctgaacaaatgtgacatggttgacgatgaagagttgctagagttggttgaaatggaggttcgtgagcttctgtctcaatacgatttcccaggcgacgacactccagtcatccgtggttcagcgttgaaagccctggaaggtgacgctgagtgggaagctaaaattatcgagttggcagaagctctggatagctatattccgcaaccagaacgcgctattgatagaccattcctattgccaattgaagacgtattctctatttctggtcgtggtactgtagttactggtcgtgtagaacgcggtattgttaaggtcggcgaagaagttgaaatcgttggtattatcgatacgattaaaacaacttgtactggcgttgaaatgttccgcaagctgctggatgaaggccgtgctggtgaaaatgttggtgttctgctgcgtggtactaagcgtgacgatgttcagcgtggtcaagtactggcgaaaccaggttctatcaagccacacacgaagtttgagtcagaagtttatattctgagcaaagatgaaggcggccgtcatacaccgttcttcaagggctaccgtcctcagttctacttccgtacaactgacgtgaccggtaccattgagctgccagaaggcgttgaaatggtcatgcctggtgacaacgtaaacatggttgttaacctaattgctcctatcgcaatggatgatggt

SEQ ID NO: 240 - DNA, 829 bp, Yersinia rohdei ATCC 43380
tggcgcgatcctggttgttgctgcaactgatggcccaatgccacagactcgcgagcacatcctgttgggtcgtcaagtgggtgttccttacatcttagtcttcctgaacaagtgtgacatggttgacgacgaagagttgctggaactggttgaaatggaagttcgtgagcttctgtctcaatacgatttccctggcgatgacactccggttattcgtggttccgcgctgaaagcgctggaaggcgaggccgagtgggaagccaaaattattgaacttgctgaagcactggatagctacattccacagccagagcgcgcgattgataaaccattcttgctgccaatcgaagacgtattctctatctcaggccgtggaacagttgttaccgggcgtgttgagcgcggtatcgtcagagtgggcgaagaagttgaaatcgtgggtatcatcgacaccattaaaaccacttgtaccggtgttgaaatgttccgcaaactgctggacgaaggccgtgccggtgagaacgttggtgttctgctgcgcggtactaaacgcgatgacgtgcaacgtggtcaagtgttggctaaaccaggttctattaagccgcataccaaatttgagtcagaagtttatattctgagcaaagatgaaggtggtcgtcatactccgttcttcaaaggttaccgtccacagttctacttccgtacaactgacgtgaccggtaccatcgaactgccagacggtgttgagatggtgatgccaggtgataacattcaaatgattgttaacctgattgcgcctattgcaatggatgacggtctacgatttgca

SEQ ID NO: 241 - DNA, 804 bp, Yokenella regensburgei ATCC 35313
tggcgcgatcctggttgttgctgcgactgacggcccgatgccgcagactcgtgagcacatcctgctgggtcgtcaggtaggcgttccgtacatcatcgtgttcctgaacaaatgcgacatggttgatgacgaagagctgctggaactggtagaaatggaagttcgtgaacttctgtctcagtacgatttcccgggcgacgacactccgatcatccgtggttctgctctgaaagcgctggaaggcgaagcagagtgggaagctaaaatcgttgagctggctggcttcctggattcttacatcccagaaccagttcgtgctatcgacctgccgttcctgctgccgatcgaagacgtattctccatctccggtcgtggcaccgttgttaccggtcgtgtagagcgcggtatcgttaaagttggcgaagaagttgaaatcgttggtatcaaagagactgctaagtctacctgtaccggcgttgaaatgttccgcaaactgctggacgaaggccgtgctggtgagaacgttggtgttctgctgcgtggtatcaaacgtgaagaaatcgaacgtggtcaggtactggctaagccgggttccatcaagccgcacaccaaattcgaatctgaagtttatatcctgtccaaagacgaaggcggccgtcatactccgttcttcaaaggctaccgtccgcagttctacttccgtacaactgacgtgactggtaccatcgaactgccggaaggcgtagagatggtaatgccgggcgacaacatcaaaatggttgttaccctgatccacccgatcgc

SEQ ID NO: 242 - DNA, 849 bp, Achromobacter xylosoxidans subsp. denitrificans ATCC 15173
tcagttcccccgcgatcacatgcccaagatctacgaagcgcttactctggccgacgagggttcctcgttcgccgaaaagggtctgacgctggaagtgcagcaacagctgggcgacggcgtggtgcgtaccatcgcgctgggctccagcgacggcctgcgccgcggtatgaaggtcaccggtacgggcgcgccgatctcggtgccggtcggcaccggcacgctgggccgcatcatggacgtgctgggtcgtcccatcgacgaagccggcccgatccagcacgaagaaaagcgtggcattcaccagccggctccccgtttcgacgaactgtcgccgtcggtggaactgctggaaaccggcatcaaggttattgacctggtctgcccgttcgccaagggcggcaaggtcggcctgttcggcggcgccggcgtgggcaagaccgtcaacatgatggaactgatcaacaacatcgccaagcagcacagcggcttgtcggtgttcgccggcgtgggcgagcgtacccgcgaaggcaacgacttctaccacgaaatggaagagtcgaacgttctggacaaggttgcgatggtgttcggtcagatgaacgaacccccgggcaaccgtctgcgcgtggcgctgaccggcctgaccatggccgagaagttccgcgacgaaggccgcgacatcctgttcttcgtggacaacatctaccgctacaccctggccggtacggaagtgtccgcgctgctgggccgtatgccgtcggcagtgggctaccagcccacgctggccgaagaaatgggcaagctgcaagagcgcatcacctcgaccaagaccggctcgatcacctcgat

SEQ ID NO: 243 - DNA, 787 bp, Acinetobacter baumannii ATCC 19606
tgaaactactttagaagttcagcaacaacttggtgatggtgttgttcgtaccatcgcaatgggttctacagaaggtcttaaacgtggtcttactgtaactagcacaaacgcaccgatctctgttccagttggtacagccactcttggccgtatcatggacgttttaggtcgtcctatcgatgaagcaggtcctgttgcgactgaagaacgtttgccgattcaccgtcaagcgccttcttatgctgaacaagcagcttctactgaccttttagaaactggtattaaagtcatcgacttactttgcccgtttgcgaaaggtggtaaagttggtttattcggtggtgctggtgttggtaaaaccgttaacatgatggaattgatcaacaacatcgcgaaagcacactcaggtttatctgtgtttgctggtgttggtgagcgtactcgtgaaggtaatgacttctatcacgaaatgaaagattctaacgttcttgacaaagtagcaatggtctacggtcagatgaacgagccaccaggtaaccgtttacgcgtagcgttaactggtttgactatggctgaatacttccgtgatgaaaaagacgaaaacggtaaaggtcgtgacgtattattattcgtcgacaacatctaccgttatacacttgcaggtactgaagtatcagcattgttaggtcgtatgccatctgcggtaggttaccaacctacacttgcagaagaaatgggtgttcttcaagagcgtattacatctactaaatctggttcgatcacttcg

SEQ ID NO: 244 - DNA, 825 bp, Acinetobacter lwoffii strain CDCF 3697
gttcctaagatctatgacgctctccacgttgatggcactgaaactacattagaagttcagcaacaacttggtgatggcgtagttcgtactattgcaatgggttctactgaaggccttaagcgtggtttgaacgtaactaacactaacgcgccgatttctgtaccagtaggtacagcgactctaggtcgtatcatggacgttcttggtcgcccaatcgacgaagctggtccagttgcgactgaagcgcgtttgccgattcaccgtcaagcaccttcttatgctgaacaagcagcttctactgaccttttagaaactggtattaaagtcatcgacttactttgcccgttcgctaaaggtggtaaagttggtctgttcggtggtgccggtgttggtaaaactgtaaacatgatggagttgatcaacaacatcgctaaagcgcactcaggtttatctgtattcgctggtgttggtgagcgtactcgtgaaggtaatgacttctatcacgagatgaaagactcaaacgttctagacaaagtagcaatggtctacggtcagatgaacgagccaccgggtaaccgtttacgcgtagcgttgactggtttgaccatggctgagtacttccgtgacgagaaagacgaaaacggcaaaggccgtgacgtactattgttcgtagataacatctaccgttatacactagcaggtactgaagtatcagcacttctaggtcgtatgccgtctgcagtaggttaccaaccgacacttgcagaagagatgggtgttcttcaagaacgtattacatcgactaagtctggttcgattacgtca

SEQ ID NO: 245 - DNA, 837 bp, Staphylococcus saprophyticus strain CSG 197
caatgaagttccagaaattaacaatgccttagtcgtagacgttgaaagagatgaaggtacagtatctcttacattagaagtggcattacaacttggcgatgatgtcgtacgtacaattgcaatggattctactgatggtgttaaacgtggtacagaagttcgagatagcggagatagcatcagtgttccagttggtgatgctacgttaggacgtgtgtttaatgttcttggtgatacaattgacttagacgagaagcttgatacttctgtcaaacgtgatccaattcatagagaagcacctgcattcgatcaattatcaacaaaagttgaaatcttagaaacaggtattaaagtaattgatttacttgcaccatatattaaaggtggtaaaatcggtttattcggtggcgctggtgtaggtaaaacagtattaattcaagaattaattaataatatagctcaagaacatggtggtatttcagtatttgccggcgtaggtgaacgtacgcgtgaaggtaatgacttatactacgaaatgagtgatagtggtgttattaagaaaacagctatggtcttcggacaaatgaatgagccacctggtgcgcgtatgcgtgttgctttatcaggcttaacaatggctgaacacttccgtgatgtacaaggacaagatgttttactatttattgataacatattcagatttacgcaagctggttcagaagtatcagcactattaggtcgtatgccatcagccgttggttatcaacctacccttgctactgaaatgggtcaattacaagaacgtattacatcaacaactaaaggatctgtaacgtc

SEQ ID NO: 246 - DNA, 851 bp, Alcaligenes faecalis ATCC 15554
ttcccccgcgacagcatccctaaagtctacgaagcattgacgctcgttgacgaaagttcggctttcgcagaaaaaggcctgacttttgaagtacagcaacaattgggtgacggtgtagttcgcaccatcgccatgggttccagcgacggcctgcgccgcggtatggaagtggccggttcgggcgctcccatctccgttcccgtgggtgtcggcaccctgggtcgcattatggacgttctgggtcgccctattgacgaagtcggtcctattcagtccgacgagcgtcgcgccattcaccagcctgcgcctactttcgacgaactgtcgccttccgtagagctgctggaaaccggtattaaagtgattgacctggtttgcccgttcgccaagggtggtaaggttggtctgttcggtggtgccggtgtgggcaagaccgtgaacatgctggagctgatcaacaacatcgccaaggcacacagcggtctgtccgtgtttgccggtgtgggtgagcgtacccgtgaaggtaacgacttctaccacgaaatggccgatgctggcgttatccagatggacaacctgagcgagtccaaagtggccatggtgttcggtcagatgaacgaacctccaggcaaccgtctgcgtgtggcactgtccggcctgaccatggccgagaagttccgtgacgaaggccgtgacatcctgttctttgtggacaacatctaccgctacacgctggccggtacagaagtgtccgctctgctgggtcgtatgccttccgcagtgggttaccagcctacgctggccgaggaaatgggtaagctgcaagagcgcattacctccaccaagaccgg

SEQ ID NO: 247 - DNA, 846 bp, Bacillus anthracis strain 4229
gatggcggaaagctaccagaaatctacaacgcccttacggtaaaacagagcaacgaaaacggaacaagcattaacttaacatttgaagttgcacttcatttaggtgatgacacagttcgtacagttgcaatgtcttccacagatggacttgttcgtggcacagaagtagaagatactggtaaagcaatctctgtaccagttggtgatgcaacacttggtcgtgtatttaacgtattaggtgatgcaattgacttagatggtgaggttcctgcggatgtacgtcgtgatccaattcaccgtcaagcacctgcattcgaagaattatctactaaagtagaaattcttgaaactggtattaaagtagtagacttacttgctccttacattaagggtggtaagatcggtctattcggtggtgccggtgtaggtaaaacggtattaattcaggaattaatcaataacatcgcacaagaacacggtggtatctctgtattcgctggtgtaggtgagcgtactcgtgagggtaatgacttataccacgaaatgagcgattctggcgtaattaagaaaactgcgatggtattcggacaaatgaacgagccacctggagcacgtcaacgtgttgcgttaacaggtttaacaatggctgagcatttccgtgatgagcaaggacaagatgtacttctgttcatcgataatatcttccgtttcacgcaagcaggttctgaagtatctgcccttcttggccgtatgccatctgcggtaggttaccaaccaacacttgcaacagaaatgggtcaattacaagagcgtattacatctacaaataaagggtctatcacgtct

SEQ ID NO: 248 - DNA, 810 bp, Bacillus cereus ATCC 14579
ccagaaatctacaatgcccttacggtaaaacaaagcaacgaaaacggaagcatgaacttaacatttgaagttgcacttcatttaggtgatgatacagttcgtacagttgcgatgtcttccacagatggacttgttcgtggcacagaagtagaagatactggtaaagcaatctctgtaccagttggtgatgcaacacttggacgtgtattcaacgtattaggtgatgcaattgacttagatggtgaacttcctgcggatgtacaccgtgatccaattcaccgtcaagcacctgcattcgaagaattatctactaaagtagaaattcttgaaactggtattaaagtagtagacttacttgctccttacattaagggtggtaagatcggcctattcggtggtgccggcgtaggtaaaacagtattaattcaggagttaatcaataacatcgcacaagagcacggtggtatctctgtattcgctggtgtaggtgagcgtactcgtgagggtaatgacttataccacgaaatgagcgattctggcgtaatcaagaaaactgcgatggtattcggacaaatgaacgagccacctggagcacgtcaacgtgttgcattaacaggtttaacaatggctgagcatttccgtgatgagcaaggacaagacgtacttctgttcatcgataacatcttccgtttcacgcaagcgggttctgaagtatctgcccttcttggtcgtatgccatctgcggtaggttaccaaccaacacttgcaacagaaatgggtcaattacaagagcgtattacatctacaaat

SEQ ID NO: 249 - DNA, 944 bp, Bacteroides distasonis ATCC 8503
ctttgattatgggacagaagaaacagtaaccctcccccgtatccacgacgccatggagatttcccgcccaaacggaaagatcttgatcgtcgaagttcagcaacacatcggggaaaacaccgtccgtaccgtagcgatggatacgaccgacggattgagacgaggcatggaggccgtgtcatacggaatgcccatcaccatgccgaccggcgaccaagtcaaaggacgtttaatgaatgtcaccggcgaccctatcgatggcatggcccagcttactaaagacggggctcttcccatccatcgtgagcctcctaaattcgaggatctgacaacgacccaagaggtcttgtacacgggtattaaagtaatcgatttattggaaccttacgccaaaggaggcaagatcggacttttcggaggagccggagtcggcaaaacggtattgatcatggaattgatcaacaacatcgcaaagaaaaacaacggattctccgtcttcgccggtgtgggtgaacgtacacgtgaaggaaatgacctattgcgtgaaatgatccaatccggtgtcatccgatacggcgaggagtttaagaagagtatggaggcaggcaactgggacttgtcgaagatcgattacgatgaattggctaagtcgcaggctaccttggtattcgggcagatgaacgaaccgccgggcgcccgctcgtccgtggccttatccggtttgacgatcgccgaatccttccgtgacaaagcctctgagggagaaagaaaagatatattattcttcatcgataatatcttccgtttcacccaagccggttccgaggtttccgccttgctggggcgtatgccttccgccgtaggttaccaaccgacattggccacggaaatgggagctatgcaagagcgtatcacttcaaccaagaagggctccatcacctccg

SEQ ID NO: 250 - DNA, 939 bp, Bacteroides ovatus ATCC 8483
ttgagggtacggatgcagaattggtgctgccaagcatccacgacgcactggagataaagaggccaaacggcaaaatactggttgtagaagttcagcaacatatcggcgaaaatacggtgcgtaccgtagcgatggacagtactgacggacttcagagaggcatgaaagtgtatcccaccggaggcccgatcacgatgccgattggcgaacagattaaaggacgactgatgaacgtagtcggtgattcgatcgacggtatgaaaggactcgaccgcaaaggtgcatattccattcatcgcgacccccctaagtttgaggatttgactactgtgcaagaggtgctcttcacaggtatcaaagtgatcgacctgctcgaaccgtatgccaaaggtggtaaaatcggtttgttcggcggtgccggtgtaggaaagactgtattgattcaggaacttatcaataatatcgccaagaaacataatggattctctgtatttgccggagtaggtgaacgtacccgtgaaggtaacgacttgctgcgcgaaatgattgaatccggtgtaatccgttacggcgaagcattcaaagaaggaatggagaaaggtcactgggatctttcgaaagtggattataacgaactggagaaatcgcaagtgtctctgattttcggtcagatgaacgagcctccgggcgcacgtgcctctgtggcattgtccggactgacggtggcggaatctttccgcgacgcaggaaaagaaggtgagaaacgcgatattctgttctttattgataatatcttccgtttcacgcaagcaggttcagaagtgtccgcccttttgggacgtatgccctccgctgttggttaccagcccacgttggctacggaaatgggtgcgatgcaggaacgtatcacgtctacccgcaaaggttctatcacctccg

SEQ ID NO: 251 - DNA, 833 bp, Leclercia adecarboxylata ATCC 23216
cgaattccctcaggatgccgtaccgcgcgtgtacgatgctcttgaggttcagaatggtaatgagagcctggtgctggaagttcagcagcagctcggcggcggtattgtgcgtaccatcgccatgggttcttccgacggtctgcgtcgtggtctggaagttaaagacctcgagcacccaatcgaagtaccagtaggtaaagcaaccctgggccgtatcatgaacgtcctgggtcagccgatcgacatgaaaggcgacatcggcgaagaagagcgttgggctatccaccgttcagcaccttcctatgaagagctgtccagctctcaggaactgctggaaaccggcatcaaagttatcgacctgatgtgtccgttcgcgaagggcggtaaagttggtctgttcggcggtgcgggtgtaggtaaaaccgtaaacatgatggagctgatccgtaacatcgcgatcgagcactccggttactccgtgtttgcaggcgtgggtgagcgtactcgtgagggtaacgacttctaccacgaaatgaccgactccaacgttctggacaaagtatccctggtttacggccagatgaacgagccaccaggaaaccgtctgcgcgttgcgctgaccggcctgaccatggctgagaagttccgtgacgaaggtcgtgacgtactgctgttcgttgacaacatctaccgttacaccctggccggtacggaagtatccgcactgctgggtcgtatgccatcagcagtaggctaccagccgaccctggcggaagagatgggtgttctgcaggaacgtatcacctctaccaaaaccggttctatcacctccg

SEQ ID NO: 252 - DNA, 819 bp, Stenotrophomonas maltophilia CDC F3338
gtgtacgacgcactgaaggtggaaaacaccgagatcaccctcgaagtccagcagcagctgggcgacggcgtggtgcgtaccatcgccctcggttccaccgacggcctgaagcgcaacctggttgccgtcaacaccggccgtggcatctcggtgccggtcggcgccggcaccctgggccgcatcatggacgtgctgggccgtccgatcgacgaagccggcccggtcgctgccagcgacaactgggaaatccaccgcgctgcgccgtcgtatgaagaccagtccccggccaccgagctgctggaaaccggcatcaaggtcatcgacctgatgtgcccgttcgccaagggcggcaaggtcggcctgttcggcggcgccggcgtcggcaagaccgtcaacatgatggaactgatcaacaacatcgccaaggcgcacagcggcctgtccgtgttcgccggcgtgggtgagcgtacccgtgagggcaacgacttctaccacgagatgaaggactccaacgtcctggacaaggtggcgatggtgtacggccagatgaacgagccgccgggcaaccgtctgcgcgtcgccctgaccggcctgaccatggccgagtacttccgcgatgagaaggacgaaaacggcaagggcaaggacgtcctgctgttcgtcgacaacatctaccgctacaccctggccggtaccgaagtgtcggcactgctgggccgcatgccgtccgcggtgggttaccagccgaccctggccgaggaaatgggcgtcctgcaggagcgcatcacctcgaccaagaatggttcgatcacctcgatc

SEQ ID NO: 253 - DNA, 864 bp, Bartonella henselae ATCC 49882
agtttgaaggccctttgccaaatattctcaatgcattagaaacagataatttgggcaatcggctagttttagaagttgctcagcatttgggtgaaaataccgtgcgtaccattgccatggatactaccgatggtcttgtccgtggtcaaaaagtttttgatacaggaacacagatcagtgttcccgtgggagaagcaacacttggtcgtattatgaatgtgattggagagccggttgataatgttggcccaattgctacaagcaaaacccgttccattcaccaagaggctcctgaatatgtggagcaatcaaccgcatcagaaatccttgtgactggtattaaagtcgttgatctgttagctccttattctaaaggggggaaggttggtttgtttggaggtgccggtgttggtaaaaccgttctcattatggagcttatcaacaatattgcaaaggcgcatggtggctattcagtgtttgccggtgttggtgaacgtacacgtgagggaaatgatctttattatgaaatgatcgaaagccgtgtgaatgtgaatccaaaagacaacaatggttcaacagaaggatcaaaatgtgcactcgtttatgggcaaatgaatgaaccaccaggggcgcgtgcacgtgtggctctttcaggattgaccattgcagaaagtttccgtgatgagggacaagatgttttgttcttcgtagataatattttccgttttacgcaagcaggcgctgaagtgtcagctcttttagggcgtattccttctgctgtagggtatcagccaactttggcaactgatatgggggctttgcaagagcgtattaccagtacaagaacaggctctattacctctg

SEQ ID NO: 254 - DNA, 866 bp, Bifidobacterium adolescentis ATCC 15703
ttcccggtgggccacctgcccgacatttacaatgcacttaccgttgaactgkccaacaccggygtccacgaasagggcgagaccaccaagaagatcacccttgmggttgaacagcatcttggcgattccaccgtgcgtaccgtcgctctgaagccgactgacggccttgtgcgtggcgccaccgtgtatgacaccggcggcccgatctctgtgccggttggcgatgtcaccaagggccacgtattcgacgtgtccggcaacatcctcaacaagaaggccgacgagaccgttaaggttaccgaacgttggtctatccaccgtaacccgccggcattcgaccagctggagtccaagacccagatgttcgaaaccggtatcaaggtcatcgatttgctgaccccgtatgtgcagggcggcaagatcggtctgttcggcggcgcaggcgtcggcaagaccgtgctgatccaggaaatgattcagcgtgtggctcagaaccacggcggtgtgtccgtgttcgcaggcgtcggcgagcgtacccgtgagggtaacgatctgatcggcgaaatggacgaagccggcgtgctcgagaagaccgcactggtcttcggccagatggatgagcagccgggtacccgtctgcgcgtgccgctgaccgcactgaccatggcagagtacttccgtgacgtacagaatcaggacgtgctgctgttcatcgataacatcttccgtttcacccaggctggttccgaggtgtccaccctgctcggccgtatgccgtccgcagtgggctaccagccgaacctggccgatgagatgggcgcgctgcaggagcgaatcacttcgacccgtggacactccatcacctc

SEQ ID NO: 255 - DNA, 842 bp, Brucella abortus strain S2308
aaggccagctgccgctgatcctgaacgcgcttgaagtggacaatcagggccatcgtctggttctcgaagttgcccagcacctcggcgaagacaccgtgcgcaccatcgccatggacgcgaccgaaggtctcgttcgcggtcaggaagcacgcgacactggcgaaccgatcatggtgccggtcggcgtcgaaacgcttggccgcatcatgaacgtcatcggcgagccggttgacgaagcaggccccatcaagaccaaggcaacccgcgccatccaccagaacgcgccggaatatatcgaacagtcgaccgaagccgaaattctggtcacgggcatcaaggtcgtcgaccttctggcgccttacgccaagggcggcaagatcggcctcttcggcggtgcaggcgtcggcaagaccgttctcatcatggaactcatcaacaacgtcgccaaggcgcacggcggttattccgtgttcgcaggcgtcggtgagcgtacccgtgagggcaacgacctttaccacgaaatgatcgagtcgggcgtgaacaagctcggcggcggcgaaggctccaaggcagccctcgtttacggccagatgaacgaacccccgggtgcccgcgcccgcgttgccctttccggtctgacggttgctgaaaacttccgtgaccagggccaggacgttctgttcttcgtggacaacatcttccgcttcacgcaggcaggttcggaagtgtcggctcttctcggccgtattccttccgctgtgggttatcagccgacgctggcaaccgacatgggcgccatgcaggaacgcatcaccacgacgaccaagggttcgatcacctcg

SEQ ID NO: 256 - DNA, 833 bp, Cedecea davisae ATCC 33431
cgagttccctcaggacggcgtaccgcgcgttkatgatgcgcttgaagtacaaaataacagcgagcagctggtgctggaagttcagcagcagctcggcggcggtatcgtgcgtaccatcgctatgggttcttccgacggtctgcgtcgtggtctggaagttaaagacctcgagcacccgatcgaagtcccggtaggtaaagcgacccttggccgtatcatgaacgtgctgggtcagccgatcgacatgaaaggcgatatcggcgaagaagaccgttgggctattcaccgcgctgcaccttcctatgaagagctgtccagctctcaggaactgctggaaaccggcatcaaagtaatcgaccttatctgtccgttcgctaagggcggtaaagtaggtctgttcggtggtgcgggcgtgggtaaaaccgtaaacatgatggagcttatccgtaacatcgcgatcgagcactccggctactccgtgtttgcgggcgtgggtgagcgtactcgtgagggtaacgacttctatcacgaaatgaccgactccaacgttctggacaaagttgccctggtttacggccagatgaacgagccaccgggtaaccgtctgcgcgtagcgctgaccggtctgaccatcgcggagaaattccgtgacgaaggtcgtgacgttctgctgttcgttgataacatctaccgttacaccctggccggtactgaagtatccgcgctgctgggtcgtatgccttctgcggtaggttaccagccaactctggcggaagagatgggtgttcttcaggagcgtattacctccaccaagaccggttccatcacctccg

SEQ ID NO: 257 - DNA, 829 bp, Cedecea lapagei ATCC 33432
ttccctcaggacggcgtaccgcgcgtatatgacgcgcttgaggtacagaataacagcgagaagctggtgctggaagttcagcagcagctcggcggcggtatcgtacgtaccatcgcaatgggttcttccgacggtctgcgtcgtggtctggaagtgaaagacctcgagcacccgatcgaagtcccggtaggtaaagcgactctgggtcgtatcatgaacgtgctgggtcagccaattgatatgaaaggcgacatcggcgaagaagatcgttgggcgattcaccgcgcagcaccttcctatgaagagctgtccagctctcaggaactgctggaaaccggcatcaaagttatcgacctgatttgtccgttcgctaagggcggtaaagttggtctgttcggtggtgcgggcgtaggtaaaaccgtaaacatgatggagctgatccgtaacatcgcgatcgagcactccggttactccgtgtttgcaggcgtgggtgagcgtactcgtgagggtaacgacttctaccacgagatgaccgactccaacgttctggacaaagttgcactggtttacggccagatgaacgagccgccaggtaaccgtctgcgcgtagcgctgaccggtctgaccatcgcggagaaattccgtgacgaaggccgtgacgttctgctgttcgtcgataacatctatcgttataccctggccggtacagaagtttctgcactgctgggtcgtatgccatctgcggtaggttatcagcctactctggcagaagagatgggtgttcttcaggagcgtattacctccaccaagaccggttccatcacttccg

SEQ ID NO: 258 - DNA, 830 bp, Cedecea neteri ATCC 33855
tccctcaggacggcgtaccgcgcgtttatgacgcgcttgaggtacagaacaacaatgagaagctggtgctggaagttcagcagcagctcggcggcggtatcgtgcgtaccatcgcaatgggttcttccgacggtctgcgtcgtggtctggtagtaacagacctcgagcacccgatcgaagtcccggtaggtaaagcgacccttggccgtatcatgaacgtgctgggtcagccgatcgacatgaaaggcgacatcggcgaagaagaccgttgggcgattcaccgcgcagcaccttcctacgaagagctgtccagctctcaggaattgctggaaaccggcatcaaagttatcgacctgatttgtccgttcgctaagggcggtaaagtaggtctgttcggtggtgcgggcgtaggtaaaaccgtaaacatgatggagctgatccgtaacattgcgatcgagcactccggttattccgtgtttgcgggcgtgggtgagcgtactcgtgagggtaacgacttctaccacgaaatgaccgactccaacgttctggataaagtagcactggtttacggccagatgaacgagccaccaggtaaccgtctgcgcgtagcgctgaccggtctgaccatcgcggaaaaattccgtgacgaaggccgcgacgttttgctgttcgttgataacatctaccgttataccctggccggtaccgaagtatctgcactgctgggtcgtatgccttctgcggtaggttatcagccaactctggcagaagagatgggtgttcttcaggagcgtattacctccaccaagaccggttctatcacctccgta

SEQ ID NO: 259 - DNA, 931 bp, Chryseobacterium meningosepticum strain CDC B7681
tttcaggaagtagaggaactaccaaacatttatgacgcacttgaagttgtcagagaaggccagaaaggtctgatcttagaagttgaacaacacatcggtgaggatacagtgagatgtatcgctatggatgcaacagacggacttcaaagaggacaatctgtaataggacatggaagacaaattactatgcctattggtgaagaagtaaatggtagattgttcaacgtggtaggagatgctatcgacggacttcaggaattatctaaagacaatggtttgccaatccacagagaagcacctaaattcgatcagttatcaacttctgctgaagtactatatacaggtatcaaagtaatcgaccttatcgagccttatgcaaaaggtggtaaaattggtttgttcggtggtgctggtgtaggtaaaacagtattgatccaggaattgattaataacattgctaaaggacacggtggtctttctgtattcgcaggagtaggtgagagaacaagagaaggaaatgaccttcttcgtgagatgttagagtctggtattattaaatatggtgacgaattcatgcattctatggagaacggtggatgggatctttctaaagttgacagtgagttgatgaaagagtctaaagctgctttcgttttcggacagatgaacgagccaccaggtgcaagagcacgtgtagccctttctggtcttactttagctgaatactaccgtgatggtggcgaaagcggacaaggtagagacgttcttttcttcgtagacaacatcttccgttttacacaggctggttctgaggtgtctgcacttctaggtcgtatgccttcagcggtaggttaccaaccaactctagcttctgagatgggtgcaatgcaggagagaattacttcaactaaaaacggatctattacatctg

SEQ ID NO: 260 - DNA, 726 bp, Citrobacter amalonaticus ATCC 25405
gtatcgtacgtaccatcgcaatgggttcttccgacggtctgcgtcgtggtctggaagtcaaagacctcgagcacccgatcgaagtcccggtaggtaaagcaaccctgggtcgtatcatgaacgtcctgggtcacccgatcgacatgaaaggcgatatcggtgaagaagagcgttgggctatccaccgcgcagcaccgtcctatgaagagctgtccagctctcaggaactgctggaaaccggtatcaaagttatcgacctgatgtgtccgttcgcgaasggcggtaaagtgggtctgttcggtggtgcgggtgtaggtaaaaccgtaaacatgatggagcttatccgtaacatcgcgatcgagcactccggttactccgtgtttgcgggcgtaggtgaacgtactcgtgagggtaacgacttctaccacgaaatgaccgactccaacgttctggataaagtatccctggtatatggccagatgaacgagccgccgggaaaccgtctgcgcgttgcactgaccggtctgaccatggcagagaaattccgtgacgaaggtcgtgacgtactgctgttcgtcgataacatctatcgttacaccctggccggtacggaagtttccgcactgctgggtcgtatgccatcagcggtaggttaccagccgaccctggcggaagagatgggtgttctgcaggaacgtatcacttctaccaaaaccggttctatca

SEQ ID NO: 261 - DNA, 812 bp, Citrobacter braakii ATCC 43162
gccgtaccgcgcgtgtacgatgctcttgaggttatgaatggtaaagagagcctggtgctggaagttcagcagcagctcggcggcggtatcgtacgtaccatcgccatgggttcttccgacggtctgcgtcgtggtctggaagttaaagatctcgagcacccgatcgaagtcccggtaggtaaagcaactctgggtcgtatcatgaacgtcctgggtcacccgatcgacatgaaaggcgatatcggtgaagaagagcgttgggctatccaccgcgcggcaccttcctatgaagagctgtccagctctcaggaactgctggaaaccggcatcaaagttatcgacctgatgtgtccgttcgctaagggcggtaaagttggtctgttcggtggtgcgggtgtaggtaaaaccgtaaacatgatggagctgatccgtaacatcgcgatcgaacactccggttactccgtgtttgcgggcgtgggtgaacgtactcgtgagggtaacgacttctaccacgaaatgaccgactccaacgttctggataaagtatccctggtatatggccagatgaacgagccgccgggaaaccgtctgcgcgttgctctgaccggtctgaccatggcagagaagttccgtgacgaaggtcgtgacgttctgctgttcgttgataacatctatcgttacaccctggccggtacagaagtatccgctctgctgggtcgtatgccatcagcggtaggctaccagccgaccctggcggaagagatgggtgttcttcaggaacgtatcacctctaccaaaaccggttctatcac

SEQ ID NO: 262 - DNA, 811 bp, Citrobacter koseri ATCC 27156
gcgcgtgtacgacgcccttgaggtgcagaatggtaatgaacatctggtgctggaagttcagcagcagctcggtggcggtatcgtacgtaccatcgccatgggttcttccgacggcctgcgtcgtggtctggatgtgaaagaccttgagcacccgatcgaagtcccggtaggtaaagcaacgctgggtcgtatcatgaacgtactgggcgaaccagtagacatgaaaggcgagatcggtgaagaagagcgttgggctatccaccgtgcggcaccgtcctacgaagagttgtcaaactctcaggaactgctggaaaccggtatcaaagttatcgacctgatgtgcccgttcgcgaagggcggtaaagtgggtctgttcggtggtgcgggtgtaggtaaaaccgtaaacatgatggagctgatccgtaacatcgcgatcgaacactccggttactccgtgtttgcgggcgtaggtgaacgtactcgtgagggtaacgacttctaccacgaaatgaccgactccaacgttatcgacaaagtatccctggtttacggccagatgaacgagccgccgggaaaccgtctgcgcgttgcgctgaccggcctgaccatggcggagaaattccgtgacgaaggtcgtgacgttctgctgttcgtcgacaacatctaccgttacaccctggccggtacggaagtatccgcactgctgggtcgtatgccttcagcggtaggttaccagccgaccctggcggaagagatgggtgttttgcaggaacgtatcacctccaccaaaaccggttctatcacctccgta

SEQ ID NO: 263 - DNA, 816 bp, Citrobacter farmeri ATCC 51112
gatgccgtaccgcgcgtgtacgatgctcttgaggttatgaatggtaaagagagtctggtgctggaagttcagcagcagctcggcggcggtatcgtacgtaccatcgcgatgggttcttccgacggtctgcgtcgtggtctggaagtaaaagacctcgaacacccgatcgaagtcccggtaggtaaagcaactctgggtcgtatcatgaacgtcctgggtcacccgatcgacatgaaaggcgatatcggtgaagaagagcgttgggctatccaccgcgcagcgccatcctatgaagagctgtccagctctcaggaactgctggaaaccggtatcaaagttatcgacctgatgtgtccgtttgcgaagggcggtaaagtcggtctgttcggtggtgcgggtgtaggtaaaaccgtaaacatgatggaactcatccgtaacatcgcgatcgagcactccggttactccgtgtttgcgggcgtaggtgaacgtactcgtgagggtaacgacttctaccacgaaatgaccgattccaacgttctggataaagtatccctggtatatggccagatgaacgagccgccgggaaaccgtctgcgcgttgcgctgaccggtctgaccatggcagagaaattccgtgacgaaggtcgtgacgtactgctgttcgtcgataacatctatcgttacaccctggccggtacggaagtatccgcactgctgggccgtatgccatcagcggtaggctaccagccaaccctggcggaagagatgggtgttctgcaggaacgtatcacttctaccaaaaccggttctattacc

SEQ ID NO: 264 - DNA, 819 bp, Citrobacter freundii ATCC 8090
aggatgccgtaccgcgcgtgtacgatgctcttgaggttatgaatggtaaagagagcctggtgctggaagttcagcagcagctcggcggcggtatcgtacgtaccatcgccatgggttcttctgacggtctgcgtcgtggtctggaagttaaagacctcgagcacccgatcgaagtcccggtaggtaaagcaacgctgggtcgtatcatgaacgttctgggtcacccgatcgacatgaaaggcgatatcggtgaagaagagcgttgggctatccaccgtgcagcaccttcctacgaagagctgtcaagctctcaggaactgctggaaaccggtatcaaagttatcgacctgatgtgtccgttcgctaagggcggtaaagttggtctgttcggtggtgcgggtgtaggtaaaaccgtaaacatgatggagctgatccgtaacatcgcgatcgaacactccggttactccgtgtttgcgggcgtaggtgaacgtactcgtgagggtaacgacttctaccacgaaatgaccgactccaacgttctggacaaagtatccctggtatatggccagatgaacgagccgcctggaaaccgtctgcgtgttgcgctgaccggtctgaccatggctgagaagttccgtgacgaaggtcgtgacgttctgctgttcgttgataacatctatcgttacaccctggccggtacagaagtatctgcactgctgggtcgtatgccatcagcggtaggctaccagccgaccctggcggaagagatgggtgttctgcaggaacgtatcacctccaccaaaaccggttctatcacct

SEQ ID NO: 265 - DNA, 822 bp, Citrobacter koseri ATCC 27028
gatgccgtaccgcgcgtgtacgacgcccttgaggtgcagaatggtaatgaacatctggtgctggaagttcagcagcagctcggtggcggtatcgtacgtaccatcgccatgggttcttccgacggcctgcgtcgtggtctggatgtgaaagaccttgagcacccgatcgaagtcccggtaggtaaagcaacgctgggtcgtatcatgaacgtactgggcgaaccagtagacatgaaaggcgagatcggtgaagaagagcgttgggctatccaccgtgcggcaccgtcctacgaagagttgtcaaactctcaggaactgttggaaaccggtatcaaagttatcgacctgatgtgtccgttcgcgaagggcggtaaagtgggtctgttcggtggtgcgggtgtaggtaaaaccgtaaacatgatggagctgatccgtaacatcgcgatcgaacactccggttactccgtgtttgcgggcgtaggtgaacgtactcgtgagggtaacgacttctaccacgaaatgaccgactccaacgttatcgacaaagtatccttggtttacggccagatgaacgagccgccgggaaaccgtctgcgcgttgcgctgaccggcctgaccatggcggagaaattccgtgacgaaggtcgtgacgttctgctgttcgtcgacaacatctaccgttacaccctggccggtacggaagtatccgcactgctgggtcgtatgccttcagcggtaggttaccagccgaccctggcggaagagatgggtgttttgcaggaacgtatcacctccaccaaaaccggttctatcacctccgta

SEQ ID NO: 266 - DNA, 820 bp, Citrobacter sedlakii ATCC 51115
gatgccgtaccgcgcgtgtacgacgcccttgaggtacagaatggtaatgagcgtctggtgctggaagttcagcagcagctcggtggcggtattgtacgtaccatcgccatgggttcttccgacggtctgcgtcgtggtctggaagtaaaagaccttgagcacccgatcgaagtcccggtaggtaaagcaacgctgggtcgtatcatgaacgtactgggcgaaccagtagacatgaaaggcgacatcggtgaagaagagcgttgggctatccaccgtgccgcgccgtcctatgaagagttgtctaactctcaggaactgctggaaaccggcatcaaagttatcgacctgatgtgtccgttcgcgaagggcggtaaagtcggtctgttcggtggtgcgggcgtaggtaaaaccgtaaacatgatggagctgatccgtaacatcgcgatcgagcactccggttactctgtgtttgcgggcgtgggtgaacgtactcgtgagggtaacgacttctaccacgaaatgaccgactccaacgttatcgacaaagtatccctggtgtacggccagatgaacgagccgcctggaaaccgtctgcgcgtcgcactgaccggtctgaccatggctgagaagttccgtgacgaaggtcgtgacgttctgctgttcgtcgataacatctatcgttacaccctggccggtacggaagtatccgcactgctgggtcgtatgccttcagcggtaggttatcagccgactctggcggaagagatgggtgttctgcaggaacgtatcacctcaaccaaaaccggttctatcacctccg

SEQ ID NO: 267 - DNA, 806 bp, Citrobacter werkmanii ATCC 51114
gccgtaccgcgcgtgtacgatgctcttgaggttatgaatggtaaagagagcctggtgctggaagttcagcagcagctcggcggcggtatcgtacgtaccatcgccatgggttcttccgacggtctgcgtcgtggtctggaagttaaagaccttgagcacccgatcgaagtcccggtaggtaaagcaaccctgggtcgtatcatgaacgtcctgggtcatccgatcgacatgaaaggcgatatcggtgaagaagagcgttgggctatccaccgcgcagcacctacctatgaagaactgtccagttctcaggaactgctggaaaccggcatcaaagttatcgacctgatgtgtccgttcgcgaagggcggtaaagttggtctgttcggtggtgcgggtgtaggtaaaaccgtaaacatgatggagctgatccgtaacatcgcgatcgaacactccggttactcagtgtttgcgggcgttggtgaacgtactcgtgagggtaacgacttctaccacgaaatgaccgactccaacgttctggacaaagtatccctggtatatggccagatgaacgagccgccgggaaaccgtctgcgcgttgcgctgaccggtctgaccatggctgagaagttccgtgacgaaggtcgtgacgttctgctgttcgttgataacatctatcgttacaccctggccggtactgaagtatctgcactgctgggtcgtatgccatcagcggtaggctaccagccaaccctggcggaagagatgggtgttctgcaggaacgtatcacctctaccaaaaccggttc

SEQ ID NO: 268 - DNA, 810 bp, Citrobacter youngae ATCC 29935
gccgtaccgcgcgtgtacgatgctcttgaggttatgaatggtaaagagagcctggtgctggaagttcagcagcagctcggcggcggtatcgtacgtaccatcgccatgggttcttccgacggtctgcgtcgtggtctggaagttaaagacctcgagcacccgatcgaagtcccggtaggtaaagcaacgctgggtcgtatcatgaacgttctgggtcacccgatcgacatgaaaggcgatatcggagaagaagagcgttgggctattcaccgcgcagcaccttcctatgaagagctgtccagctctcaggaactgctggaaaccggcatcaaagttatcgacctgatgtgtccgttcgctaagggcggtaaagttggtctgttcggtggtgcgggtgtaggtaaaaccgtaaacatgatggagcttattcgtaacatcgcgatcgagcactccggttactctgtgtttgcgggtgtaggtgaacgtactcgtgagggtaacgacttctaccacgaaatgaccgattccaacgttctggataaagtatccctggtttatggccagatgaacgagccgccgggaaaccgtctgcgcgttgcgctgaccggtctgaccatggctgagaaattccgtgacgaaggtcgtgacgtactgctgttcgtcgataacatctatcgttataccctggccggtacggaagtatccgcactgctgggtcgtatgccatcagcggtaggttaccagccgaccctggcggaagagatgggtgttctgcaggaacgtatcacttctaccaaaaccggttctatc

SEQ ID NO: 269 - DNA, 827 bp, Clostridium innocuum ATCC 14501
ttgagaacggagatttgccgcagctattgaccgctattgaaattcctctgaaagacagtgaatctctgattgtcgaagttgctcagcatatcggtgatgaacgtgtccgctgtatcgctatgggcggtacagatggtctggttcgtggaatggaagccattgatacaggatccgcaatccgtgtaccggtgggaaaagaaattctgggaagaatgttcaatgtcctcggacgtgaaattgatggtctgggacctgtaggaacggataacacactgccgatccacagacaggcaccgggctttgaggagcagcagacatccgcagaaatgctggaaacaggaattaaggtcattgacctgttatgtccatattccaagggtggtaagattggtttgtttggtggtgcgggagtaggtaaaaccgtactgattcaggagctgattcataatatcgccaaggaacatggtggaatgtccgtcgttaccggtgtaggggagagaacccgtgaaggaaacgacatgtatcatgaaatgaaggacagcggtgtccttgataagaccgtactggtttacggacagatgaatgaatcaccgggtgccagaatgcgtgtcggtctgaccgggctgacgatggcggaatatttccgtgatcacgaccatcaggatgtattgctgtttattgataatattttccgttttacccaggcgggaagtgaagtaagtgccctgctgggacgtatgccaagtgcagtaggctatcagccgacacttgcgacagaaatgggacagctgcaggagcgcattacatccacgaaggatggttccatt

SEQ ID NO: 270 - DNA, 829 bp, Clostridium perfringens ATCC 13124
gcaaatgatgaacttcctaatatatttaatgcaatacacataaaaatggacgatggaaaaatcttagtttgtgaggtagagcaacacgtaggagacgatatagttagaactatagctatggaagctactgaaggactaagaagaggtgtagaagctgttgatacaggagcacctatatcagtaccagttggtgaatgcgtattaggaagaatatttaacgtattaggtaaaccactagatagtggagctgaagttaataacgaagaaaaatatccaattcatagaccagctccatcatttgaagaacaatcagttgttcctcaaatgtttgagacaggaataaaggttatcgaccttttagcaccttaccaaagagggggaaaaatcggtctatttggaggtgcaggtgttggtaaaacagttcttatccaagagcttataaacaacatagctaaagagcacggtggactttctgtattcacaggagttggagaaagatcaagagaaggtaatgacctttactatgaaatgatggaatcaggagttataaaaaatacagcattagtatttggacaaatgaacgaaccacctggagcaagaatgagagttgctttaacaggacttactatggctgagtacttcagagaccaaggtcaagacgtgttattattcatagataacatattcagattctcacaagctggatcagaggtttcagctttattaggaagaataccatcagctgttggttaccaaccaactcttgctacagagatgggagctcttcaagagagaatcacatcaactacccatggatcaattacatcag

SEQ ID NO: 271 - DNA, 22 bp, Artificial Sequence
  Synthetic DNA Sequence
ttgtccacgttggatrtcttca

SEQ ID NO: 272 - DNA, 818 bp, Corynebacterium diphtheriae ATCC 27010
cccgcgtggcgagctgccggcactgtacaacgcgttgactgtcgaggtcaccctcgaggcagtcgctaagaccattacccttgaggttgcccagcacttgggcgacaacctcgttcgcgccgtgtccatggcccctaccgacggcctcgtccgtggtgctgttgtgaccgactcgggcaagccaatctccgtgccagttggcgacgttgttaaaggccacgttttcaacgcactgggcgattgcttggatgagccaggtctcggccgcgatggtgagcagtggggaattcaccgcgatccaccaccattcgatcagctcgaaggtaagaccgaaatcctcgagaccggtattaaggtcatcgacttgctcaccccttacgttaagggcggcaagattggtctgttcggtggtgcaggtgtgggtaagaccgtgctcatccaggagatgatcactcgtattgctcgcgagttctccggtacctccgtcttcgctggcgttggtgagcgtacccgtgagggcaccgacctcttcctcgaaatggaagaaatgggcgttcttcaggacaccgctctcgtgttcggccagatggacgagccaccaggagtccgtatgcgcgttgctctgtccggtctgaccatggcggagtacttccgcgatgttcagcaccaggacgtgcttctgttcatcgataacattttccgtttcacccaggccggttccgaggtttcgacccttcttggtcgtatgccttccgccgtgggttaccagccaaccttggctgacgagatgggtgttctccaggagcgtattacctcta

SEQ ID NO: 273 - DNA, 833 bp, Corynebacterium pseudodiphtheriticum ATCC 10700
cgatgcctgctctgtacaacgcgctgactgtcgaggtcaccctcgaggcagtcgccaagaccatcacgcttgaggttgcacagcacctcggcgataacctgatccggaccattgcgttggcacctacggacggtctcgtccgtggcgctgaggttatcgacactggtaagccaattactgttcccgtcggcgatgccgtcaaaggacacgtcttcaatgcgctcggtgagtgtttggacgaaccaggattgggccgcgacggcgaacagtggggaatccaccgcgatccgccaccattcgatgcgctggagggcaaaaccgagattctggagactggaatcaaggttatcgacctccttaccccttacgttaagggtggcaaaattggtctgttcggtggcgccggcgtcggcaagaccgttcttatccaggaaatgatcactcgtatcgctcgtaacttctccggtacttccgtgttcgccggcgtcggtgagcgtacccgtgagggtactgacctgttcctggaaatggaagagatgggcgtgttgcaagacaccgcccttgtcttcggtcaaatggacgaaccaccaggggttcgtatgcgcgtggccttgtctggtctaaccatggctgaatatttccgcgacgttcaaaaccaggacgttttgttgttcattgacaacatcttccgttttactcaggcaggttccgaggtttccacgctgttgggccgtatgccttccgccgtgggttatcagccaacattggctgatgagatgggtgttttgcaggaacggattacctctacacgtggtaagtcaattacttccctg

SEQ ID NO: 274 - DNA, 417 bp, Corynebacterium ulcerans NCTC 8665
ccgtgctcatccaggagatgatcacccgtgtggcccgcaacttcggcggcacctctgtgttcgccggcgtcggcgagcgcacccgtgagggcaacgacctctgggtcgagatggacgaggccgacgtgctcaaggacaccgccctggtgttcggccagatggacgagccgccgggaacccgtctgcgcgtggccctgtccgcgctgaccatggcggagtacttccgcgatgtgcagaaccaggacgtgctgctgttcatcgacaacatcttccgcttctcccaggccggctccgaggtctccaccctgctgggccgcatgccctccgcggtgggctaccagccgaacctggcggacgagatgggtgtgctgcaggagcgcatcacctcgactcgcggccactccatcacctcgatgc

SEQ ID NO: 275 - DNA, 835 bp, Corynebacterium urealyticum ATCC 43042
gggcagcagccagcactattcaacgcgctgcacgtcgaggttgacctcgaggcagttgcgaagaccattaccctggaggtcgcacagcacctgggtgacaacctggtgcgcaccgtctccatggccccgaccgacggcctggtccgcggtgcagaggtcaaggacaccggtaagccgatctctgtgccagtcggcgatgttgtcaaggggcacgtcttcaacgccctgggcgactgcctggatgagccaggtctcggccgcgacggcgagcagtggggcatccaccgcgagccaccggcattcgacgagctcgagggtaagaccgagatcctggagaccggcgttaaggtcatcgacctgctgaccccttacgtcaagggcggcaagattggcctcttcggtggtgcaggtgtgggtaagaccgtcctgattcaggagatgattacccgtatcgcccgcgagttctccggtacctccgtgttcgccggcgtcggcgagcgtacccgtgagggtacggacctcttcctcgagatggaggagatgggcgtgctccaggacaccgcgctggtgttcggtcagatggatgagccgccgggagtccgtatgcgcgtggctctgtccggtctgaccatggcggagtacttccgcgatgttcagggccaggacgtgctgctgttcatcgacaacatcttccgtttcacccaggcaggttctgaggtctccacgctgctcggccgcatgccgtccgcagtgggttaccagccgaccctggctgacgagatgggtgttctgcaggagcgcattacctccacgaagggtaagtccattacctccc

SEQ ID NO: 276 - DNA, 818 bp, Coxiella burnetii strain Nine Mile phase II
cccgtcacgctgtcccgaaagtgtacgatgctttgcaggtggatgaaaataatttaacgctcgaagtccaacagcaactcggggacggtgtcgtgcgcacaattgccatgggcagcactgagggcttaaaacgcgatatcgccgtaaaaaatacggaaaaaccgattgaagttcccgtaggaaaagaaactttaggtcgtatcatgaacgtgctgggtgagccgatcgatgagttaggtcccattaattcaaaagaaaaactccctattcatcgtcctgcgccgagctttattgagcaatctggcgctaccgaattattagaaaccggtattaaagtggtcgatttgctttgcccctttgctaagggaggcaaagtgggtctttttggaggcgcgggcgttggaaaaacggttaatatgatggaattaatccgtaatatcgccattgaacacagcggttattctgtttttgcgggtgtgggagaaagaacgcgagaaggcaatgatttttatcatgaaatgaaagaatccaatgtcttggataaagtggcgttggtgtacggacaaatgaacgagccgccagggaaccgcttgcgggtgggtttgacggggcttacgctggcggaagccttccgtgacgaaggacgcgacgttctgttatttatcgataatatctttcgttacactttggcaggggttgaagtctctgccctcctcggtcggatgccatcggctgtgggttatcagccgacgttggccgaagagatgggggccctgcaagaacgcattacttccactaaaaaagggtccattacgtcg

SEQ ID NO: 277 - DNA, 829 bp, Edwardsiella hoshinae ATCC 33379
ttcccgcaggacgccgtgccgaaggtgtataacgcactggaagtaaaaggcggtgccacgaaactggtactggaagtgcagcagcagctgggtggcggcgtagttcgctgcatcgcgatgggctcttccgacggtctgcgccgtgggctagaggttgaagaccaagaccatccgatcgaggttcctgttggcaaggcgactctgggccgtatcatgaacgtactgggtgatccggtcgacatgaagggcgagatcggtgaagaagagcgttgggctatccatcgtgctgcaccgagctatgaagatctgtctaactctcaggaactgctggagaccggcattaaggttatcgacctgatttgcccgttcgctaaaggcggtaaagtgggcctgttcggtggggccggtgtgggtaagaccgttaacatgatggagcttatccgtaacatcgctatcgagcactccggttactcagtcttcgccggtgtgggtgagcgtacccgtgagggtaacgacttctaccacgagatgaccgattccaacgtattggataaagtttctctggtgtatggtcagatgaacgagccaccgggaaaccgtctgcgcgtggcgctgaccggtctgaccatggcggagaaattccgtgatgaaggtcgtgatgtactgttgttcatcgataacatctaccgttataccttggccggtactgaagtctccgctctgctgggccgtatgccgtcggcggtaggttatcagccgactctggcggaggaaatgggggtgctgcaagagcgtattacctccactaagaccgggtccatcacctctg

SEQ ID NO: 278 - DNA, 809 bp, Edwardsiella tarda ATCC 15947
gccgtgccgaaggtgtataacgcactggaagtaaaaggcggtgccacgaaactggtactggaagtgcagcagcagctgggtggcggcgtcgttcgctgcatcgcgatgggctcctccgacggtctgcgccgtgggctggtggttgaagaccaagaccatccgatcgaggttccggtcggtaaggcgaccctgggccgtatcatgaacgtactgggtgatccggtcgacatgaagggcgagatcggcgaagaagagcgttgggctatccaccgcgcggcgccgagctatgaagatctgtccaactctcaggagctgctggagaccggcatcaaggttatcgacctgatttgcccgttcgccaaaggcggtaaagttggcctgttcggtggtgccggtgtgggtaagaccgttaacatgatggagcttatccgtaacatcgctatcgagcactccggttactccgtatttgccggtgtaggcgagcgtacccgtgagggtaacgacttctaccacgagatgaccgactccaacgtattggataaagtttctctggtatacggccagatgaatgagccgccgggaaaccgtctgcgtgtggcgttgaccggtctgaccatggcggagaaattccgtgatgaaggtcgcgatgtgttgttgttcatcgataacatttatcgttataccttggctggtaccgaagtttctgctctgctgggtcgtatgccgtcggcggtaggttatcagccgaccctggcggaagagatgggtgtgttgcaagagcgtatcacctcaacgaagacgggctctat

SEQ ID NO: 279 - DNA, 840 bp, Eikenella corrodens ATCC 23834
tttccgcgtaccgccattccgcgtgtttacgatgcactcaaactggttgatactgatttgacgctggaagtacagcagcagcttggtgacggcgttgtccgtaccattgcgatgggtagtacagacggtttgaaacgtggcttggctgtgcaaaatactggtgcaccgattactgtgccggtggggaaagccaccctaggccgcatcatggacgttctgggcaaccccgtggacgaacaaggtccgatcggttctgaccaaacccgtgctattcatcaatttgcacctaagttcgacgaactctccagcactaccgaattgttggaaacaggcattaaagtgatcgatttgctttgtccgtttgctaaaggtggtaaagtgggtctgtttggcggtgccggtgtgggcaaaaccgtgaacatgatggagctgattaacaacattgccaaagcgcacagtggtctttccgtattcgccggtgtgggtgagcgtactcgtgaaggtaacgacttctaccacgaaatgaaagactccaacgtgttggataaagtggcaatggtgtatggccagatgaacgagccgcctggtaaccgcttgcgtgttgctctaactggtttgtcgatggctgaatacttccgtgacgaaaaagacgaaaacggcaaaggccgtgacgtattattctttgtggataatatctaccgctatactctggcgggtaccgaagtgtcggctctgcttggccgtatgccttctgctgtgggttatcagccaactttggctgaagaaatgggtcgtttgcaggagcgtattacctccacccaaactggttccattacctct

SEQ ID NO: 280 - DNA, 803 bp, Enterobacter agglomerans ATCC 27989
gccgtaccacgagtgtacgatgcacttgaggtaaagaatggtgaagagcgtctggtgctggaagttcagcaacagctcggcggtggcgttgtacgtaccatcgcaatgggttcttctgatggtctgcgtcgtggtctggaagtaacggacctggctcacccgatcgaagtcccggtaggtaaagcaacactgggtcgtatcatgaacgtactgggcgaaccagtagacatgaaaggcgacatcggtgaagaagagcgttgggcgatccaccgtgcagcaccgtcctacgaagagttgtcaaactctcaggaactgctggaaaccggtatcaaagttatcgacctgatgtgtccgttcgctaagggcggtaaagtgggtctgttcggtggtgcgggtgtaggtaaaaccgtaaacatgatggagcttattcgtaacatcgcgatcgagcactccggttactctgtgtttgcgggcgtaggtgaacgtactcgtgagggtaacgacttctaccacgaaatgaccgactccaacgttatcgacaaagtatccctggtgtatggtcagatgaacgagccgccgggaaaccgtctgcgcgttgcgctgaccggtctgaccatggctgagaagttccgtgacgaaggtcgtgacgtactgttgttcgttgacaacatctaccgttacaccctggccggtacggaagtatccgcactgctgggccgtatgccttctgcggtaggttatcagccgacgctggcggaagagatgggcgttctgcaggaacgtatcacctccaccaaaaccgg

SEQ ID NO: 281 - DNA, 833 bp, Enterobacter amnigenus ATCC 33072
cgaattccctcaggatgccgtaccgcgcgtgtacgatgctcttgaggtacagaatggtaacgagagtctggtgctggaagttcagcagcagctcggtggtggtatcgtacgtactatcgccatgggttcttccgacggtctgcgtcgtggtctggctgttaaagatctcgaacacccgatcgaagtcccggtaggtaaagcaacactgggtcgtatcatgaacgttttgggtcaaccaatcgacatgaaaggcgacatcggtgaagaagaccgttgggcaatccaccgtgcagcaccttcctatgaagagctgtctagctctcaggaactgctggaaaccggcatcaaagttatcgacctgatgtgtccgttcgctaagggcggtaaagttggtctgttcggcggtgcgggcgtgggtaaaactgtaaacatgatggagctgatccgtaacatcgcgatcgagcactccggttactccgtgtttgcaggcgtgggtgagcgtactcgtgagggtaacgacttctaccacgaaatgaccgattccaacgttctggataaagtatccctggtttatggccagatgaacgagccaccaggaaaccgtctgcgcgttgcgctgaccggtctgactatggctgagaagttccgtgacgaaggtcgtgacgtactgctgttcgtagataacatctaccgttacaccctggccggtactgaagtatctgcgctgctgggccgtatgccttcagcggtaggttaccagccgaccctggcggaagagatgggcgttctgcaggaacgtatcacttctaccaaaaccggttctatcacctccg

SEQ ID NO: 282 - DNA, 810 bp, Enterobacter asburiae ATCC 35953
gccgtaccacgcgtgtacgacgcgcttgaggtacagaatggtaacgagagcctggtgctggaagttcagcagcagctcggcggcggtatcgtgcgtaccatcgcgatgggttcttccgacggtctgcgtcgtggtctggaagtcaaagaccttgagcacccgatcgaagtcccggtaggtaaagcaacactgggtcgtatcatgaacgtattgggtcaaccaatcgacatgaaaggcgacatcggtgaagaagagcgttgggctatccaccgcgcggcaccttcctacgaagagctgtccagctctcaggaactgctggaaaccggtatcaaagttatcgacctgatgtgtccgttcgcgaagggcggtaaagtcggtctgttcggtggtgcgggtgttggtaaaaccgtaaacatgatggagctgatccgtaacatcgcgatcgagcactccggttactccgtgtttgcgggcgtaggtgaacgtactcgtgagggtaacgacttctaccacgaaatgaccgactccaacgttctggacaaagtatccctggtttacggccagatgaacgagccaccaggaaaccgtctgcgcgttgcgctgaccggtctgacgatggctgagaagttccgtgatgaaggccgtgacgttctgctgttcgttgataacatctatcgttacaccctggccggtacggaagtatctgcactgctgggtcgtatgccttcagcggtaggttaccagcctacgctggcggaagagatgggtgttcttcaggaacgtatcacctctaccaaaaccggttctatc

SEQ ID NO: 283 - DNA, 811 bp, Enterobacter cancerogenus ATCC 35317
gccgtaccgcgcgtgtacgatgctcttgaggtacagaatggtaacgagagcctggtgctggaagttcagcagcagctcggcggcggtatcgtacgtactatcgccatgggttcttccgacggtctgcgtcgtggtctggaagtaaaagaccttgagcacccgatcgaagtcccggtaggtaaagcaacactgggtcgtatcatgaacgtattgggtcaaccaatcgacatgaaaggcgacatcggtgaagaagagcgttgggctatccaccgcgcagcaccttcctacgaagagctgtccagctctcaggaactgctggaaaccggcatcaaagttatcgacctgatgtgtccgttcgcgaagggcggtaaagtcggtctgttcggtggtgcgggtgtaggtaaaaccgtaaacatgatggagctgatccgtaacatcgcgatcgagcactccggttattccgtgtttgcgggcgtgggtgaacgtactcgtgagggtaacgacttctaccacgaaatgaccgactccaacgttctggataaagtatccctggtgtacggccagatgaacgagccaccaggaaaccgtctgcgcgttgcgctgaccggcctgaccatggctgagaagttccgtgacgaaggtcgtgacgtactgctgttcgttgataacatctaccgttacaccctggccggtaccgaagtatctgcactgctgggtcgtatgccttcagcggtaggttatcagcctacgctggcggaagagatgggtgttcttcaggaacgtatcacctcaaccaaaaccggttctatca

SEQ ID NO: 284 - DNA, 817 bp, Enterobacter cloacae ATCC 13047
gccgtaccacgcgtgtacgacgcgcttgaggtacagaatggtaacgagagcctggtgctggaagttcagcagcagctcggcggcggtatcgtgcgtaccatcgcgatggggtcttccgacggtctgcgtcgtggtctggaagttaaagaccttgagcacccgatcgaagtcccggtaggtaaagcaacactgggtcgtatcatgaacgtattgggtcagccaatcgacatgaaaggcgacatcggtgaagaagagcgttgggctatccaccgcgcggcaccttcctacgaagagctgtccagctctcaggaactgctggaaaccggtatcaaagttatcgacctgatgtgtccgtttgcgaagggcggtaaagttggtctgttcggtggtgcgggtgtaggtaaaaccgtaaacatgatggagctgatccgtaacatcgcgatcgagcactccggttactccgtatttgcgggcgtaggtgaacgtactcgtgagggtaacgacttctaccacgaaatgaccgactccaacgttctggacaaagtatccctggtttacggccagatgaacgagccaccaggaaaccgtctgcgcgttgcgctgactggtctgacgatggctgagaagttccgtgacgaaggccgtgacgttctgctgttcgttgataacatctaccgttacaccctggccggtacggaagtatctgcactgctgggtcgtatgccttcagcggtaggttatcagcctacgctggcggaagagatgggtgttcttcaggaacgtatcacctctaccaaaaccggttctatcacttccg

SEQ ID NO: 285 - DNA, 766 bp, Enterobacter gergoviae ATCC 33028
aatgagagcctggtgctggaagttcagcagcagctcggcggcggtatcgtgcgtaccatcgcaatgggttcttctgacggtctgcgtcgcggtctggaagttaaagatctcgaacatccgatcgaagtcccggtaggtaaagcgaccctcggccgtattatgaacgtgctgggtcagccggttgatatgaaaggcgatatcggcgaagaagagcgttgggcgatccaccgcgctgcgccgtcctatgaagagctctccagctctcaggaactgctggaaaccggtatcaaggtaatggacctgatttgcccgttcgcgaagggcggtaaagtcggtctgttcggcggtgcgggcgttggtaaaaccgtaaacatgatggagctgatccgtaacatcgcgatcgagcactccggctactccgtgtttgcgggcgtgggtgaacgtactcgtgagggtaacgacttctaccacgaaatgaccgactccaacgttatcgacaaagtatccctggtgtacggccagatgaacgagccgccgggaaaccgtctgcgcgtggcgctgaccggtctgaccatggctgagaaattccgtgacgaaggtcgtgacgttctgctgttcgtcgataacatctaccgctataccctcgccggtactgaagtatccgcactgctgggccgtatgccttctgcagtaggttaccagccgacgctggcggaagagatgggtgttctgcaggaacgtatcacctccaccaaaaccggttcta

SEQ ID NO: 286 - DNA, 805 bp, Enterobacter hormaechei ATCC 49162
gccgtaccacgcgtgtacgacgcgcttgaggtacagaatggtaacgagagcctggtgctggaagttcagcagcagctcggcggcggtatcgtgcgtaccatcgccatgggttcttccgacggtctgcgtcgtggtctggaagtgaaagaccttgagcacccgatcgaagtcccggtaggtaaagcaacgctgggtcgtatcatgaacgtattgggtcagccaatcgacatgaaaggcgacatcggtgaagaagagcgttgggctatccaccgcgcggcaccttcctacgaagagctgtccagctctcaggaactgctggaaaccggcatcaaagttatcgacctgatgtgtccgtttgcgaagggcggtaaagttggtctgttcggtggtgcgggtgtaggtaaaaccgtaaacatgatggagctgatccgtaacatcgcgatcgagcactccggttactccgtgtttgcgggcgtgggtgaacgtactcgtgagggtaacgacttctaccacgaaatgaccgactccaacgttctggacaaagtatccctggtttacggccagatgaacgagccaccaggaaaccgtctgcgcgttgcgctgactggcctgacgatggctgagaagttccgtgacgaaggccgtgacgttctgctgttcgtcgataacatctaccgttacaccctggccggtacggaagtatctgcactgctgggtcgtatgccttcagcggtaggttatcagccaacgcttgcggaagagatgggtgttcttcaggaacgtatcacctcgaccaaaaccggtt

SEQ ID NO: 287 - DNA, 791 bp, Enterobacter sakazakii ATCC 29544
tacgacgcccttgaggtaacgaatggtaatgagcgtctggtgctggaagtccagcagcagctcggcggcggtatcgtacgtaccatcgcgatgggctcttccgacggtctgcgtcgcggtctgcctgttgcagaccttgagcacccgatcgaagtgccggtaggtaaagcgacgctgggtcgtatcatgaacgtcctgggtcagcctatcgacatgaaaggcgacatcggcgaagaagagcgttgggcgattcatcgcgcggcgccgtcctatgaagagctgtccagctctcaggaactgctggaaaccggcatcaaagttatcgacctgatgtgtccgttcgcgaagggcggtaaagtcggtctgttcggtggtgcaggtgtaggtaaaaccgtaaacatgatggagcttattcgtaacatcgcgattgagcactccggttactccgtgtttgcgggcgtgggcgaacgtacccgtgaaggtaacgacttctaccacgaaatgaccgactccaacgtactggataaagtatccctggtgtacggccagatgaacgagccgccgggaaaccgtctgcgcgttgcgctgaccggcctgaccatggctgagaaattccgtgacgaaggtcgtgacgttctgctgttcgtcgacaacatctaccgttacaccctggccggtactgaagtatccgcactgctgggccgtatgccttcagcggtaggttatcagccgaccctggcggaagagatgggtgttctgcaggagcgtatcacctccaccaaaaccggttc

SEQ ID NO: 288 - DNA, 839 bp, Enterococcus avium ATCC 14025
tttctttagatcaatccttaccagacatcaacaatgcgttgattgtttacaaaaaagataaaacaaaagttgttcttgaagttgctttggaacttggtgatggtgttatccgcacaatcgctatggaggctactgatggattgcaacgtggaatggaagttgtcgatactggcaaatcaatctccgttcctgtaggtaaagatactctaggtcgtgtgtttaacgtattaggtgaaacgattgataaagaagcaccttttccagaagatgcagaaagaagcggcattcataaaaaggcgcctgcttttgaagaccttagtacaagtaacgagattttggaaacagggatcaaggttatcgacttattagccccttatttaaaaggtgggaaagtcggactattcggtggtgccggtgttggtaaaaccgttttgatccaagaattaattcataatatcgcccaagaacacggtggtatttcagtgtttaccggtgttggggaacgtactcgtgaagggaacgacctttattatgaaatgaaagactctggcgttattgagaaaacagccatggtgttcggacaaatgaacgagccgcctggtgcacgtatgcgtgttgccttgactggtttgacattagctgaatatttccgtgatgaagaaggacaagatgtgttgctatttattgacaacatcttccgctttactcaagccggatcagaagtttctgccttattaggacgtatgccatcagccgttgggtatcaaccaactttggcaactgaaatggggcaattacaagaacgaatcacttcaaccaaaaaaggttcgatcacttca

SEQ ID NO: 289 - DNA, 847 bp, Enterococcus casseliflavus ATCC 25788
ttctctctagaccaatcattaccagatatcaacaatgcgttgattgtttacaaaaaagatgagcagaaaacaaaagttgtgttagaagctgccttagaacttggcgacggcgttatccgtacgattgccatggaatcaacagatggcttacaacgaggaatggaagtaatcgatacaggcgcctccatttctgttccagttgggacagaaaccttaggacgggtgtttaatgtcttaggggacaccatcgatttagaagcgccgttccctgaagaagcaccccgcagtgggattcacaaaaaagcacctgactttgatgaattgtcaacaagtacggagatccttgaaactgggatcaaagttatcgatttgttagccccttatttaaaaggggggaaagttggacttttcggtggtgccggtgttggtaaaaccgtcttgatccaagaattgatccacaacatcgcccaagagcatggtgggatctctgtcttcacaggtgttggtgaacggacacgtgaaggaaatgacctttataatgaaatgaaagaatctggcgttatcgaaaaaacagccatggtgtttggacaaatgaacgaaccaccaggtgctcggatgcgggtagccttgactggtttgacattagccgagtacttccgtgatgtggaaggacaagacgtgctcttgtttatcgataatatcttccgcttcactcaagcaggttctgaagtatctgccttactaggtcggatgccgtctgccgttgggtatcagccaacattagcaactgagatggggcaattacaagaacggatcacatcgacgaagaaaggttccgttacgtcta

SEQ ID NO: 290 - DNA, 845 bp, Enterococcus durans ATCC 19432
tttctttagaccaatccttaccagatatcaacaacgctttagttgtttataaaaatgatgagaagaaatcgaaagttgttcttgaaacagcgctagaattaggtgacggtgtcatccgtacaatcgcgatggaatcaacagatggtttacaacgcggaatggaagtcattgatacagaaaaagcaatttctgtaccagtgggtaaagaaacgttaggtcgtgtattcaatgtattaggagatacgatcgatttatctgcacctttcccagaagatgcaaaacgtagcgaaatccataaaaaagcaccaaactttgatgagttaagtacaagtactgagatccttgaaactgggatcaaagttattgacttgcttgctccttacttaaaaggtgggaaagttggattattcggtggtgccggtgtaggtaaaactgtattgatccaagaattgatccataatatcgctcaagaacacggtggtatttctgtatttactggtgttggtgaacgtacacgtgaaggtaatgacctttattatgaaatgaaagattcaggagttattgaaaaaacagccatggtgtttggtcaaatgaacgaaccaccaggtgcacgtatgcgtgttgccttgactggtttgacgattgctgaatacttccgtgatgttgaagggcaagacgtgctattgtttattgataatattttccgtttcactcaagccggttcagaagtttctgccctattaggtcgtatgccttctgccgttgggtaccaaccaacgctagcaacagaaatgggtcaattacaagaacggatcacttcaacgaaaaaaggttcaatcacttca

SEQ ID NO: 291 - DNA, 840 bp, Enterococcus faecalis ATCC 29212
ttagatcaatccttacccgatattaacaacgctttagtcgtttataaaaatggcgaagcaaaacaaaaagtagtacttgaagtcgctttagaactaggtgatggagtgattcgttctatcgccatggaatcgacagatggtttacaacgtggaatggaagttatcgatacaggaaaatcaatttcagttcctgttggtaaagatacattaggtcgtgtgtttaacgttttaggagacacaattgacttagaagcgccattccctgcagatgctgaacgtagtgggattcataaaaaagcgccagcatttgatgaattaagtaccagtaatgaaattttagaaacagggattaaagttattgacttattagcaccttatctaaaaggtggtaaagtcggacttttcggtggtgccggtgttggtaaaaccgtcttaattcaagaattaattcataatattgcccaagaacatggagggatttccgtctttactggtgttggtgaacggacacgtgaagggaacgatctgtactatgaaatgaaagattcaggcgttattgaaaaaacagccatggtttttggtcaaatgaacgaaccgccaggtgcacggatgcgtgtggccttaactgggttaacgattgctgaatatttccgtgatgtggaaggacaagacgtgctattatttattgataacattttccgtttcacccaagccggttcagaagtttctgcccttttaggtcggatgccgtcagccgttggttaccaaccaaccttagcgactgaaatgggacaattacaagaacggattacttcaacgaaaaaaggatcaattacctct

SEQ ID NO: 292 - DNA, 831 bp, Enterococcus faecium ATCC 19434
tttctttagaccaatccttaccagatatcaacaacgcattagttgtttataaaaatgacgaaaataaatcaaaagttgttcttgaagcagcgttagaattaggggacggagtgatccggaccattgcgatggaatcaacagatggtttacaaagaggaatggaagtcattgatacaggcaaagcaatctctgttcctgtaggtaaagaaacattaggtcgcgtattcaacgtactaggagatacgatcgatttagaaacacctttcccagaagatgcggaaagaagcgaaattcataaaaaagcaccagcctttgacgaattaagtacaagtacagaaattttggaaacagggatcaaagttatcgatttgcttgccccatatttaaaaggtgggaaagtcggactattcggtggtgccggtgttggtaaaaccgtactgatccaagaactgatccataatatcgcccaagaacatggtggtatttctgtatttaccggtgtaggtgaacgtactcgtgaaggtaatgacttgtattatgaaatgaaagattcaggagttatcgaaaaaacagccatggtgttcggacaaatgaacgaaccaccaggtgcacgtatgcgtgttgctttgactggtttgacgattgcggaatatttccgtgatgtagaaggtcaagatgtactgttgtttatcgacaacattttccgtttcactcaagctggatctgaagtatcagccttgttaggacggatgccttctgcggttggttatcaaccaacattggcaacagaaatgggtcaattgcaagaacgtatcacatctacgaaaaaag

SEQ ID NO: 293 - DNA, 826 bp, Enterococcus gallinarum ATCC 49573
ccttaccagatatcaacaatgcgttgatcgtttacaaaaaagacgagaaaaaaacaaaagtagtattggaagccgctttagaactaggggatggtgtgatccgcaccatcgcaatggaatctacagacggtttgcaacgaggaatggaagtcatcgataccggtgcctcaatctctgtccctgtaggaacagatactctaggccgagtatttaatgtactaggcgatactatcgacttggaagcaccattcccagaagatgccaaacgtagtggcatccacaaaaaagccccagatttcgatgaattgtcaacaagtacagaaatccttgaaactgggatcaaagttatcgatttattagctccttacttaaaaggtggtaaagtcggcttgttcggtggtgccggtgttggtaaaaccgtattgattcaagaattgattcacaatatcgctcaagagcatgggggaatttcagtatttaccggtgttggcgaacggacgcgtgaaggtaatgacttgtattatgaaatgaaagaatcaggcgttatcgaaaagacagccatggttttcggtcaaatgaatgaaccaccaggtgcccggatgcgggttgctttgactggtttgaccattgctgagtatttccgtgacgttgaaggacaagatgtgctcttgtttatcgataatattttccgtttcacacaagcgggttctgaagtatctgccttgttaggccggatgccatcagccgttggttatcaaccaactctagcaactgaaatgggtcaattacaagaacgaatcacttctacgaaaaaaggatctgtaac

SEQ ID NO: 294 - DNA, 846 bp, Enterococcus saccharolyticus ATCC 43076
tttctttggaccaatccttaccagacatcaacaatgcgttggtggtctataaaaagaatgatgaaaaaacaaaagtggtacttgaaacagctttagaacttggtgatggtgtcgtacgtacgattgctatgtcgtcaacagacggtttgcaacgtgggatggaagtcatcgatacaggagcatcaatttctgttcctgttgggaaagagacattaggacgtgtatttaacgttttaggggagactatcgacttagatggtccattcccagaagaagtagcacgagatggtattcataaaaaggcacctgattttgatgaattaagtacaagtacggagattcttgaaacagggattaaagtaatcgatttattagcgccttacttaaaaggtgggaaagttggtttattcggtggtgccggtgtaggtaaaacggtattaattcaagaattgattaacaatattgcgcaagaacatggtggtatttcagtatttgcgggtgttggtgagcgtactcgtgaaggaaatgacctttattatgaaatgaaagagtcgggcgttattgagaaaacagcgatggtttttggacaaatgaacgaaccaccaggtgcacgtatgcgagttgctttaactggtttaaccattgcagaatacttccgtgatgttgaaggacaagatgtattactatttattgataacattttccgttttactcaagctggttcagaagtttcagctttattaggacgtatgccttcagcggtagggtatcaaccgacattagcaacagaaatgggacaattacaagaacgtattacgtcaacgaaaaaaggctcaattacatcaa

SEQ ID NO: 295 - DNA, 803 bp, Escherichia fergusonii ATCC 35469
gccgtaccgcgcgtgtacgatgctcttgaggtgcaaaatggtaatgagcgtctggtgctggaagttcagcagcagctcggcggtggtatcgtgcgtaccatcgcaatggggtcctccgacggtctgcgtcgcggtctggatgtaaaagacctcgaacacccgatcgaagtcccggtaggtaaagcgactctgggccgtatcatgaacgtactgggtgaaccggtcgacatgaaaggcgagatcggtgaagaagagcgttgggcgattcaccgcgcagcaccttcctacgaagagctgtcaaactctcaggaactgctggaaaccggtatcaaagttatcgacctgatgtgtccgttcgctaagggcggtaaagtcggtctgttcggtggtgcgggtgtaggtaaaactgtaaacatgatggagcttattcgtaacatcgcgatcgagcactccggttactctgtgtttgcgggcgtaggtgaacgtactcgtgagggtaacgacttctaccacgaaatgactgactccaacgttatcgacaaagtatccctggtatatggccagatgaacgagccgccgggaaaccgtctgcgcgttgcactgaccggcctgaccatggctgagaaattccgtgacgaaggtcgtgacgttctgctgttcgttgacaacatctatcgttacaccctggccggtacggaagtatccgcactgctgggccgtatgccttcagcggtaggttatcagccgactctggcggaagagatgggcgttcttcaggaacgtatcacctccaccaaaactgg

SEQ ID NO: 296 - DNA, 822 bp, Escherichia hermannii ATCC 33650
gatgccgtaccgcgcgtgtacgatgctcttgaggtgcaaaatggtgatgagcgtctggtgctggaagtgcagcagcagctcggcggcggtatcgtgcgtaccatcgcaatgggttcttccgacggtctgcgtcgtggtctgactgtcgtcgacctcgagcacccgatcgaagtcccggtaggtaaagcgaccctgggccgtatcatgaacgtgctgggtcagccgatcgacatgaaaggcgatatcggtgaagaagagcgttgggcgattcaccgcgcggcgccgtcctatgaagagctgtccagctctcaggaactgctggaaaccggcatcaaagttatcgacctgatgtgtccgttcgcgaagggcggtaaagtcggtctgttcggtggtgcgggcgtaggtaaaaccgtaaacatgatggagctgatccgtaacatcgcgatcgagcactccggttactctgtgtttgcgggcgtgggtgaacgtactcgtgagggtaacgacttctaccatgaaatgaccgactccaacgttctggacaaagtatccctggtttacggccagatgaacgaaccgccgggaaaccgtctgcgcgttgcactgaccggcctgaccatggctgagaaattccgtgacgaaggtcgtgacgttctgttgttcgtcgacaacatctaccgttacaccctggccggtactgaagtatccgcactgctgggccgtatgccttctgcggtaggttaccagccgaccctggcggaagagatgggcgttctgcaggagcgtatcacctccaccaaaaccggttctatcacctccgta

SEQ ID NO: 297 - DNA, 808 bp, Escherichia vulneris ATCC 33821
ccgaacgtgtacgacgccctcgaagtgacaaatggtaatgagcgtctggtgctggaagttcagcagcagctcggcggcggtatcgtacgtaccatcgctatgggttcttccgacggtctgcgtcgtggtctggaagttcaggacctcgagcacccgatcgaagtgccggtaggtaaagcgaccctgggtcgtatcatgaacgtactgggtcagccgatcgatatgaaaggcgacatcggtgaagaagagcgttgggctattcaccgtgcagcaccgtcctatgaagagctctccagctctcaggaactgctggaaaccggcatcaaggttatcgacctgatgtgtccgttcgccaagggcggtaaagtcggcctgttcggcggcgcgggcgtgggtaaaaccgtaaacatgatggagctgatccgtaacatcgcgatcgagcactccggttactccgtgtttgcaggcgtgggtgagcgtactcgtgagggtaacgacttctaccacgagatgaccgactccaacgttctggacaaagtatccctggtgtacggccagatgaacgagccgccgggaaaccgtctgcgcgtggcactgaccggcctgaccatggctgagaagttccgtgacgaaggtcgtgacgttctgctgttcgttgacaacatctatcgttacaccctggccggtacggaagtatctgcactgctgggccgtatgccttcagcggtaggttaccagccgacgctggcggaagagatgggcgttctgcaggagcgtatcacctccaccaaaaccggttctatcacct

SEQ ID NO: 298 - DNA, 843 bp, Eubacterium lentum ATCC 43055
tttccccctgatcagctgccggcgatttacaacgcgctgacggttgatgccaagaccctggcgggcgacttgcacctcgtgctcgaggtcgagacgcacctgccgggcaaccttgtccgctcggtggccatgagctcgacggacggtctcgtccgcggcctcgaggtcgtcgacacgggcaacccgatcatgatgcccgtgggtcccgagaccctgggtcgcatctggaacgtcatgggcgagcccgtcgacgagaagccgatgcccgaggtgaagggctacatgcccatccaccgtccggctccggactacgacgagctgtccaccaccaccgagatcttcgagaccggcatcaaggccatcgacctcgtcgagcccttcgtcaagggcggcaagacgggtctgttcggcggcgccggcgtgggcaagacggttatcatccaggagctcatcaacaacctggcccaggagcacggcggcacgtcggtgttcacgggcgtgggcgagcgtacccgcgagggtaccgacctctacctggagatgagcgactcgggcgtcatcaacaagacctgcctcgtgtacggtcagatgaacgagcctccgggagcgcgtctgcgcgtgggtctcgcgggcctcaccgaggcggagtacttccgcgatcagggccaggacgtgcttctgttcgtggacaacatcttccgcttcacgcaggccggctccgaggtgtccgctctgctgggccgcatgccctctgccgtgggttaccagccgacgctggcaaccgagatgggcgacctgcaggagcgcatcacgtcgacgtccaccggctccatcacgtccgtg

SEQ ID NO: 299 - DNA, 829 bp, Ewingella americana ATCC 33852
tccctcaggatgcagtaccgaacgtgtacaatgctcttgaggtagaaaacggtgcctccaaactggttctggaagttcagcaacagttaggcggcggcgttgttcgttgtatcgcaatgggtacctcagacggccttcgtcgcggtctgaaagtgaacaacctggaacacccaattgaagttccggttggtaaagcgactctgggtcgtatcatgaacgtattgggtgaaccaatcgacatgaaaggtgaaatcggcgaagaagaacgtcgtgcaattcaccgtccagcgccttcttatgaagagctggctaactcccaagaattgctggaaaccggtatcaaagttatggacctgatgtgtccgttcgctaagggcggtaaagtcggtctgttcggtggtgcgggtgttggtaaaactgtaaacatgatggagctgatccgtaacatcgcgatcgagcactccggttactcagtgtttgcaggcgtgggtgagcgtactcgtgagggtaacgacttctaccacgaaatgactgactccaacgttatcgacaaagtttccctggtctatggtcagatgaatgagccaccaggtaaccgtctgcgcgttgcactgaccggcctgaccatggcggagaaattccgtgatgaaggtcgtgacgtactgctgttcgttgacaacatttaccgttacaccctggcaggtaccgaagtgtccgcacttctgggccgtatgccatcggcggtaggttatcagccaacgctggcggaagagatgggtgctctgcaagagcgtatcacctctaccaaaagtggttctatcacctccgt

SEQ ID NO: 300 - DNA, 805 bp, Francisella tularensis strain LVS
aacacgcctaaagtatatgatgctttaaatgtagtagaagctggtttagtattagaagttcagcaacaaattggtgatggcgtagttcgtacaattgctatgggatctagtgatggtcttagacgtggtatggaagttaagaacacaaatgcgcctatttctgttccagttggacatggcacacttggacgtatcatgaatgttttaggtgaaccaattgatgaagctggtccaattgaatatactgagaaaagatctatccatcaagctcctcctgcatatgatgagttagcattaagtacagaaatattagaaacaggtatcaaagtagttgaccttatttgtccatttgctaagggcggtaaagttggtttatttggcggtgcaggtgttggtaaaactgtaacgatgatggaacttatcaacaatattgcaaaagaacatagtggctactctgtattttccggtgttggtgaaagaactcgtgaaggtaatgacttctactatgagatgaaatattctaatgtattggataaagtatcattagtatatggtcagatgaatgagccgcctggaaacagattaagagtagctcttagtggcttaacaatagcagaaggattccgtgatgaaaagcgtgatgttttgatgtttatcgataacatctatcgttatacattagcaggtacagaggtatcggcgctacttggtcgtatgccatctgctgtgggttatcagccaacgcttgcagctgagatgggtgctttacaggagcgtattacatctactaagacaggatctatta

SEQ ID NO: 301 - DNA, 825 bp, Fusobacterium gonidiaformans ATCC 25563
gacgaattgccaaaaatatacaatgcattaaaggtgcaagttggagaaaaagaacttgtattggaagtgcaacaacatttgggaaataatgttgtgagaacagtagcgatggactcaacagatggattgcttcgaggaatggaagtaatggataccggagcaccgattactgttccagtagggaaggcggttttaggaagaatattgaatgttttgggagagcctgtggatcaaaaagggcctgtggaaacagaagaatatttacctatccatagagaagcaccaaaatttgaagaacaagaaacagtaacagaaatttttgaaacaggaattaaagtcatagatttgttagccccttatatcaaaggaggaaagacaggtctattcggtggagccggagtagggaaaacagttttaattatggaattaattaataacattgcaaagggccacggaggaatttctgtgtttgcaggagttggagaaagaacaagagaaggaagagatttatacaacgaaatgacagagtccggagttttgaataagacctcgttggtgtatggtcaaatgaatgagccgcccggagcaagacttcgtgtggcgttgacaggattaacggttgctgaaaactttagagataaagaagggcaagatgtattgttgtttatcgacaatatcttccgtttcacacaagcaggatcagaagtatcggctctattgggaagaattccatcggcagtaggatatcaaccgaacttagcgacagaaatgggaactttacaagaaagaattacttctacaaaatcaggatctatcacttcggta

SEQ ID NO: 302 - DNA, 806 bp, Fusobacterium necrophorum subsp. necrophorum ATCC 25286
acaatgcattaaaggtacaggtgggagaaagggaacttgtgttggaagtgcagcaacatttaggaaataatgttgtcagaacagtagcaatggattcaacagacggattacttcggggaatggaagtgagagatacaggagttcccattactgttccggtaggaaaggcggttttgggaagaatattaaatgtcttaggggagcctgtggacgaaaaaggtccgatagagacagaagaatatttaccaatacatagagaagcaccgaaatttgaagaacaggaaacggtgacagaaatttttgaaacaggaattaaagtcattgatttgttagctccttatattaaaggaggaaaaacaggcctattcggaggagccggagtaggaaaaaccgttttgattatggaactgatcaataatattgcaaaaggtcatggaggaatttctgtttttgcaggagttggagaaagaacgagagagggaagagatctatacaacgaaatgacagagtccggagttttgaataaaacttctttggtatatgggcaaatgaatgagccgcccggagcaagacttcgagtggctttaaccggacttactgttgccgaaaatttcagagataaagagggacaggatgtcttattgttcattgacaatattttccgtttcacacaagcaggttcggaagtatcggcacttttggggagaattccttctgcagtgggatatcaaccgaacttggcgacagaaatgggaagcttacaagaaagaattacttctacaaaatccggttctatcacttccgtg

SEQ ID NO: 303 - DNA, 821 bp, Fusobacterium nucleatum subsp. polymorphum ATCC 10953
gatgaattgcctgcaatatataatgctttaaaagtaaaattagaagataaggaacttgttctagaagttgaacaacatcttggtaacaatgttgtaagaactgttgctatggattcaactgatggattaaaaagaggaatggaagttatagatacaggtaaaccaattacagtaccagttggtaaagctgttcttggtagaatattaaatgttttaggagaacctgttgataatcaaggtcctataaatgctgaaacatttttacctattcatagagaagcaccagaatttgatgacttagaaactgaaactgaaatatttgaaacaggaataaaagttatagacttattagcaccatatattaaaggtggaaaaataggattatttggtggagctggagtaggaaaaacagttttaataatggaacttatcaacaacattgcaaaaggacatggaggaatttcagtttttgcaggagttggagaaagaacaagagaaggtagagacttatatggtgaaatgactgaatcaggagttatcacaaaaacagctcttgtttatggacaaatgaatgagccacctggagcaagacttagagttgcattaacagggcttactgttgcagaaaactttagagataaagatgggcaagatgttcttctatttatagataatatatttagatttacacaagcaggttcagaagtttcagctttacttggaagaataccatcagctgttggatatcaaccaaacctagcaactgaaatgggtgctttacaagaaagaataacatctacaaaatctggttcaattacatc

SEQ ID NO: 304 - DNA, 864 bp, Gardnerella vaginalis ATCC 49145
ttcccagttggctatcttccagatatttataatgctctcaaggttgatatcaacaccgttggaaacacggagggagataccgtccacgagattacattggaagttgagcagcaccttggtgattcaactgtgcgagcagtggcacttaagcctacggacggcttggtccgtggtgctttagtgcgagatactggtggcccaatttctgtgcctgttggagatgttacaaaaggtcacgtttttgacgtaactggtaacattttaaacgctaaaccaggcgaaaacattgaggtgaccgagcgctggccaatccaccgcaacccacctgctttcgatcagcttgagtctaagactcaaatgtttgaaacaggcattaaggttatcgatttgcttacgccttacgttcagggcggaaagattggtctgttcggtggtgcaggcgttggtaaaactgtgttgattcaggagatgattcagcgcgttgcacagaaccacggcggtgtgtctgtgtttgctggcgttggcgaacgtactcgtgagggtaacgatttgattggcgaaatggctgaggctggcgttttggagaaaacagcgcttgtctttggtcagatggatgagcctcctgggactcgtcttcgtgtgcctcttactgctttgactatggctgagtatttccgtgatgttcagaatcaggatgtgttgctgtttatcgacaacatcttccgctttactcaggcaggttctgaggtttccacgttgcttggtcgtatgccttctgcagttggttatcagccaaacttggcggatgaaatgggtgcgttgcaggagcgcattacttctacgcgcggtcattctattacgtcg

SEQ ID NO: 305 - DNA, 848 bp, Gemella haemolysans ATCC 10379
tcgaatcagggcatatgccaaatctattaaacgctttagaagtttacatagaaaaaggcgatgggaaaaaagaaaaattagttcttgaagtttctcttgaaattggtgataacgtagtaagaacaatcgctatgtcatctactgatggattaaataggggagcagaagtagtagatacaggagcaccaattacagttcctgtaggtaactacacattaggtcgtgtgttcaacgtattaggtgaagcagttgaccacggtgaagaagcaggagcagaagttcgtaaagattcaattcacaaagaagctccaacattcgatgaattatcaactcacgttgaggttcttgaaacaggtattaaagttatcgacttacttgcaccatatattaaaggtggtaaaatcggtcttttcggtggtgcgggagttggtaaaacggttcttatccaagaacttatcaacaacgttgcgcaacaacacggtggattatcagtattcacaggtgtaggtgagcgtactcgtgaaggaaatgacttatactatgaaatgaaagattctggtgttattaacaaaacagccatggtattcggacaaatgaacgaaccaccaggtgctcgtatgcgtgtagcattaacaggattaacaatggcggaatacttccgtgatgaagaaggacaagacgtgcttctattcatcgataacattttccgtttcacacaagcaggttctgaggtttctgcgttattaggacgtatgccatcagccgttggttaccaaccaacacttgctacagagatgggacgtttacaagaacgtataacatcaactaaaaaaggttctgttacatct

SEQ ID NO: 306 - DNA, 848 bp, Gemella morbillorum ATCC 27824
tcgaatcagggcatatgcctaatctactaaacgctttagaagtttatatagaaaaaggcgatggaaaaaaagaaaaattagttcttgaagtttctcttgaaatcggggataatgtcgtaagaactattgcgatgtcatctactgatggattaaacagaggggcagaagtagttgatactggagcgccaattacagtgccagtaggtaactatacattaggacgtgtgttcaacgtattaggtgaagcagttgaccacggagaagaagctggagcagaagttcaaaaagaatctattcataaagaagctccaactttcgaagaattatcaacacatgttgaggtattagaaacaggtattaaagttatcgaccttcttgcaccatatattaaaggtggtaagattggactattcggtggtgctggagttgggaaaacagttcttatccaagaacttattaacaacgtagcacaacaacacggaggactttcagtatttactggggtaggtgaacgtactcgtgagggtaacgacttgtactatgaaatgaaagactctggagttattaataaaactgccatggtatttggtcaaatgaatgagccaccaggtgcacgtatgcgtgttgccttaacaggattaacaatggcagagtacttccgtgatgaagaaggacaagacgtactattatttatcgataatatcttccgtttcacacaagcagggtctgaggtatctgcattattagggcgtatgccttcagccgttggatatcaaccaactcttgcaacagaaatgggacgtcttcaagaacgtattacatcaactaaaaaaggatctgttacatct

SEQ ID NO: 307 - DNA, 813 bp, Haemophilus ducreyi DSM 8925
gatgcagtaccaaaagtatatgatgctttaaaagttgaatcaggtttaaccttagaagttcaacaacaattaggtggtggtttagtacgttgtatcgcattaggtacctcagatggtttaaagcgtagcttaaaggttgtaaatacaggtaaccctattcaagttcctgtaggcactaaaacattaggccgtattatgaatgtattaggcgaaccaattgatgaaaaaggacctattagcgaagaagctcgttgggatattcatcgtgcggctccaaattatgaagaacagtcaaatagtactgaattacttgaaaccggtatcaaagttattgacttaatttgtccatttgcaaaaggtggtaaagtcggcttatttggtggagctggtgtaggtaaaaccgttaatatgatggaattgatccgtaatattgctattgagcactcaggttattcggtttttgctggtgtaggtgagcgtactcgtgaaggtaatgatttttatcatgaaatgacggattctaatgtattagataaagtatcactagtatatggtcaaatgaatgaaccaccaggtaaccgcctacgtgttgcgttaacaggtttaactatggctgaaaaattccgtgatgaaggtcgtgatgtattatttttcgtagataatatttatcgttatactttagccggtacagaagtttctgctttattaggccgtatgccatcagcggtaggttatcaaccaacccttgcagaagaaatgggtgtattacaagaacgtattacctcaactaaaactggttcaatcacggcagta

SEQ ID NO: 308 - DNA, 826 bp, Haemophilus haemolyticus ATCC 33390
tgaatttccacaagatgcagtgccaaaagtttacgatgcattaaaagttgaatcaggtttaacacttgaggtgcaacaacaattaggtggcggtgtggtacgttgtatcgcattaggtgcttctgacggtttaaaacgtggtttaaaagtagaaaacacgaatgatccgattcaagtaccggtaggcacaaaaacccttggtcgtatcatgaatgtattgggtgaaccaattgacgaacaaggtccaatcggtgaagaagagcgttgggctatccatcgttctgcaccaagctatgaagaacaatcaaacagtacggaattattagagactggtatcaaagttatcgacttaatttgtccattcgcaaaaggtggtaaagttggtctattcggtggtgcgggtgtaggtaaaaccgttaacatgatggaattaatccgtaacatcgcgatcgagcactcaggttactccgtatttgcgggtgtaggtgaacgtactcgtgaaggtaacgacttctatcatgaaatgaaagattctaacgtattagataaagtatctttggtttatggtcagatgaatgagccaccaggtaaccgtttacgtgttgcgttaactggtttaaccatggcagaaaaattccgcgatgaaggtcgtgatgtattattcttcgtggataatatctatcgttatacccttgctggtacggaagtatctgcgttattaggtcgtatgccatctgcggtaggttaccaaccaactcttgctgaagaaatgggtgtgttacaagaacgtatcacttcaaccaaaacaggttctattacatctgta

SEQ ID NO: 309 - DNA, 809 bp, Haemophilus parahaemolyticus ATCC 10014
gatgcagtaccaaaagtatatgatgcgttaaaagttgaatcaggtttaacgcttgaagttcaacaacaattaggcggtggcttagtgcgctgtatcgcattaggtacgtctgatggtttaaaacgtggcttaaaagtagaaaatacaggcaacccaattgaagtgccagtgggcactaaaacccttggtcgtattatgaacgtattgggtgagccgattgacgaaaaaggtcctatcggtgaagaagcacgctgggcaatccaccgtgcagcaccaagctacgaagagcaatcaaatagcacggaattactcgaaacaggtatcaaagttatcgacttaatctgcccattcgcaaaagggggtaaagttggtttatttggtggtgcaggtgtaggtaaaaccgtaaatatgatggagttaatccgtaacatcgcgatcgaacactctggttactctgtatttgcaggggtaggtgagcgtactcgtgaaggtaatgacttctaccacgaaatgacagactctaacgtattagataaagtatcgttagtgtatggtcaaatgaacgaaccaccaggtaaccgtttacgcgtagctttaacaggcttaaccatggcggaaaaattccgcgatgaaggtcgtgacgtattattcttcgtcgataacatctaccgttataccctagcaggtacggaagtgtcagcacttctcggtcgtatgccatctgcggtaggttatcagccaaccttagcagaagaaatgggtgtattacaagagcgtatcacttcaaccaaaactggttctatcacctc

SEQ ID NO: 310 - DNA, 824 bp, Haemophilus parainfluenzae ATCC 7901
cgaatttccacaagatgcagtaccaaaagtttatgatgcattaaaagttgaatcgggtttaacccttgaagttcaacaacaattaggtggtggtgtggtacgttgtatcgcactgggagcttctgacggtttaaaacgcagtttaagcgttgaaaataccaataaaccaatttcagtaccggttggtgtaaaaactctcggtcgtattatgaacgtattgggcgaaccgattgatgaaagaggtcctatcggtgcggaagaagaatgggcaattcaccgttctactccaagttatgaagaacagtccaacagtaccgaattattagaaaccggtatcaaagttatcgacttaatttgtccattcgcgaagggtggtaaagttggtttattcggtggtgcgggtgtaggtaagaccgtaaatatgatggaattaatccgtaatattgcgattgagcactcaggttactccgtatttgccggtgtaggtgagcgtacccgtgaaggtaacgacttctaccatgaaatgacagaatctaacgtattagacaaagtatccctagtttacggacaaatgaatgagccgccgggtaaccgtttacgtgttgctttaaccggtttaaccatggcagaaaaattccgtgacgaaggtcgtgatgtattattcttcgtggataacatctatcgttatacccttgcagggactgaagtatcggcacttttaggccgtatgccatcagcggtaggttatcagccgacacttgcagaagaaatgggtgtgttacaagaacgtattacatcaaccaaaacaggttctattacttctg

SEQ ID NO: 311 - DNA, 811 bp, Hafnia alvei ATCC 13337
gccgtgcctaaagtgtataacgcacttgaggtgaaaggcggtgccactaaactggtactggaagttcagcagcagctaggcggcggcgttgtacgctgtatcgctatgggtacttctgacggtctgcgtcgcggactggacgttgttgacctggagcacccgattgaagtcccagtaggtaaagcgaccttaggccgcattatgaacgtactgggtgagccaattgatatgaagggtgatatcggcgaagaagatcgctgggctattcaccgtgaagctccaagctacgaagaactgtctaactcgcaagaactgctggaaactggtatcaaggtaatggacctgatttgtccgttcgctaagggcggtaaagttggtctgttcggtggtgcgggtgttggtaaaacagtaaacatgatggagctgatccgtaacatcgcgatcgagcactcaggttactctgtatttgccggcgtgggtgaacgtactcgtgagggtaacgacttctaccacgaaatgaccgactccaacgtattggacaaagtatcactggtttatggccagatgaacgagccaccaggaaaccgtctgcgcgttgcgctgaccggtctgactatggctgagaagttccgtgacgaaggtcgtgacgtactgctgttcatcgataacatctaccgttataccttggccggtaccgaagtatctgcactgttgggtcgtatgccttctgcggtaggttatcagccaacgctggcggaagagatgggtgttctgcaagaacgtatcacctcgaccaaaacgggttcaatca

SEQ ID NO: 312 - DNA, 831 bp, Kingella kingae ATCC 23330
gcgatgctattccacgcgtttacgatgcgttgaaactggttgatgtggacttgacattagaagtgcaacaacaactgggcgatggcgtagtgcgtaccattgcgatgggtagtaccgatggtttgaaacgcggcttagccgtgaacaacacaggcgcacctattacagtgcctgttggtaaagcaacattgggtcgtattatggacgtattgggtaatcctgttgatgaagcaggtccaattggttctgaccaaacgcgtgctattcaccaaccagctcctaaatttgatgaactgtctagcgcaaccgaattgctggaaacaggcatcaaagtgattgacttgctttgcccatttgcaaaaggtggtaaagtaggtttgtttggtggtgcaggtgtgggcaaaactgtgaacatgatggagttgattaacaacattgccaaagcgcacagtggtttgtctgtatttgcaggcgtgggtgaacgtactcgcgaaggtaatgacttctatcacgagatgaaagattctaacgtgttggataaagttgccatggtgtatggtcaaatgaatgaacctcctggcaaccgtttgcgcgttgcattgactggtttgtctatggcagaacacttccgtgatgaaaaagacgaaaatggcaaaggtcgcgatgtattgttctttgtggacaacatctatcgctacacattggcaggtacagaagtatcggcattgctgggtcgtatgccctctgcggtaggttatcaaccaacattggcagaagaaatgggtcgtttgcaagagcgtattacttcaacgcaaacaggttcgattactt

SEQ ID NO: 313 - DNA, 812 bp, Klebsiella pneumoniae subsp. ozaenae ATCC 11296
atgccgtaccacgcgtgtacgaagcccttgaggtacagaatggtaatgaagttctggtgctggaagttcagcagcagctgggcggcggtatcgtacgtaccatcgccatgggttcttctgatggtctgcgccgcggtctggatgtaaaagacctcgagcacccgatcgaagtcccggtaggtaaagcaacgctgggtcgtatcatgaacgtactgggtcaaccggttgacatgaaaggcgacatcggcgaagaagagcgttgggctatccaccgcgcggcaccgtcctatgaagagctgtccagctctcaggaactgctggaaaccggcatcaaagttatcgacctgatgtgtccgttcgccaagggcggtaaagttggtctgttcggcggtgcgggtgtaggtaaaactgtaaacatgatggagctgatccgtaacatcgcgatcgagcactccggttactctgtgtttgcgggcgtaggtgagcgtactcgtgagggtaacgacttctaccacgaaatgaccgactccaacgttatcgataaagtatccctggtgtacggccagatgaacgagccgccgggaaaccgtctgcgcgttgcgctgaccggcctgaccatggctgagaaattccgtgacgaaggtcgtgacgtactgctgttcgtcgataacatctatcgttacaccctggccggtactgaagtatccgcgctgctgggtcgtatgccttcagcggtaggttatcagccgaccctggcggaagagatgggcgttctgcaggaacgtatcacctccaccaaaaccggttctatc

SEQ ID NO: 314 - DNA, 812 bp, Klebsiella ornithinolytica ATCC 31898
atgccgtaccgcgcgtgtacgatgctcttgaggtacagaatggtaatgagagcctggtgctggaagttcagcagcagctcggcggtggtatcgtacgtgctatcgccatgggttcttccgacggtctgcgtcgtggtctggaagttaaagaccttgagcacccgatcgaagtcccggttggtaaagcaacgctgggtcgtatcatgaacgtgctgggtcagccaatcgatatgaaaggcgacatcggcgaagaagagcgttgggctattcaccgtgcagctccgtcctatgaagagctgtccagctctcaggaactgctggaaaccggcatcaaagttatcgacctgatgtgtccgttcgctaagggcggtaaagttggtctgttcggtggtgcgggtgtaggtaaaaccgtaaacatgatggagctgatccgtaacatcgcgatcgagcactccggttactccgtgtttgcgggcgtaggtgaacgtactcgtgagggtaacgacttctaccacgaaatgaccgactccaacgttctggataaagtatccctggtttatggccagatgaacgagccgccgggaaaccgtctgcgcgttgctctgaccggcctgaccatggctgagaaattccgtgacgaaggtcgtgacgttctgctgttcgtcgataacatctatcgttataccctggccggtactgaagtatccgcactgctgggtcgtatgccttcagcggtaggttatcagccgaccctggcggaagagatgggtgttctgcaggaacgtatcacctccaccaaaaccggttctatc

SEQ ID NO: 315 - DNA, 813 bp, Klebsiella oxytoca ATCC 33496
gtaccgcgcgtgtacgaggctcttgaggtacaaaatggtagtgagaatctggtgctggaagttcagcagcagctcggcggcggtattgttcgtaccatcgccatgggttcttccgacggtctgcgtcgcggtctggaagtcaaagacctcgagcatccgatcgaagtcccggtaggtaaagcaacgctgggtcgtatcatgaacgtactgggccaaccggtagacatgaaaggcgacatcggcgaagaagagcgttgggcgattcaccgcgcagcgccttcctacgaagagttgtcaaactctcaggaactgctggaaaccggcatcaaagttatcgacctgatgtgtccgtttgcgaagggcggtaaagttggtctgttcggtggtgcgggtgtaggtaaaaccgtaaacatgatggagctgatccgtaacatcgcgatcgagcactccggttactccgtgtttgcgggcgtaggtgaacgtactcgtgagggtaacgacttctaccacgaaatgaccgactccaacgttatcgataaagtatccctggtgtatggccagatgaacgagccgccgggaaaccgtctgcgcgttgcgctgaccggcctgaccatggctgagaagttccgtgacgaaggtcgtgacgttctgctgttcgtcgataacatctatcgttacaccctggccggtactgaagtatccgcactgctgggtcgtatgccttcagcggtaggttaccagccgactctggcggaagagatgggcgttctgcaggaacgtatcacctccaccaaaacgggttctatcacttcc

SEQ ID NO: 316 - DNA, 822 bp, Klebsiella planticola ATCC 33531
gatgccgtaccgcgcgtgtacgatgctcttgaggtacagaatggtaatgagagcctggtgctggaagttcagcagcagctcggcggtggtatcgtacgtgctatcgccatgggttcttctgacggtctgcgtcgtggtctggaagttaaagaccttgagcacccgatcgaagtcccggttggtaaagcaacgctgggtcgtatcatgaacgtgctgggtcagccgatcgatatgaaaggcgacatcggcgaagaagagcgttgggctattcaccgcgcagctccgtcttatgaagagctgtccagttctcaggaactgctggaaaccggcatcaaagttatcgacctgatgtgtccgttcgctaagggcggtaaagtaggtctgttcggtggtgcgggcgtaggtaaaaccgtaaacatgatggagctgatccgtaacatcgcgatcgagcactccggttactccgtgtttgcgggcgtcggtgaacgtactcgtgagggtaacgacttctaccacgaaatgaccgactccaacgttctggataaagtatccctggtttatggccagatgaacgagccgccgggaaaccgtctgcgcgttgctctgaccggcctgaccatggctgagaaattccgtgacgaaggtcgtgacgttctgctgttcgtcgataacatctatcgttataccctggccggtactgaagtatccgcactgctgggtcgtatgccttcagcggtaggttatcagccgaccctggcggaagagatgggtgttctgcaggaacgtatcacctccaccaaaaccggttctatcacttccgta

SEQ ID NO: 317 - DNA, 785 bp, Klebsiella pneumoniae subsp. pneumoniae ATCC 13883
agaatggtaatgaagttctggtgctggaagttcagcagcagctgggcggcggtatcgtacgtaccatcgccatgggttcttctgatggtctgcgccgcggtctggatgtaaaagacctcgagcacccgatcgaagtcccggtaggtaaagcaacgctgggtcgtatcatgaacgtactgggtcaaccggttgacatgaaaggcgacatcggcgaagaagagcgttgggctatccaccgcgcggcaccgtcctatgaagagctgtccagctctcaggaactgctggaaaccggcatcaaagttatcgacctgatgtgtccgttcgccaagggcggtaaagttggtctgttcggcggtgcgggtgtaggtaaaactgtaaacatgatggagctgatccgtaacatcgcgatcgagcactccggttactctgtgtttgcgggcgtaggtgagcgtactcgtgagggtaatgacttctaccacgaaatgaccgactccaacgttatcgataaagtatccctggtgtacggccagatgaacgagccgccgggaaaccgtctgcgcgttgcgctgaccggcctgaccatggctgagaaattccgtgacgaaggtcgtgacgtactgctgttcgtcgataacatctatcgttacaccctggccggtactgaagtatccgcactgctgggtcgtatgccttcagcggtaggttatcagccgaccctggcggaagagatgggcgttctgcaggaacgtatcacctccaccaaaaccggttctatcacctccgta

SEQ ID NO: 318 - DNA, 759 bp, Kluyvera ascorbata ATCC 33433
ctggtgctggaagttcagcagcagctcggcggcggtatcgtacgtwccatcgctatgggttcttccgacggtctgcgtcgcggtctggatgttaaagatctcgagcacccaatcgaagttccggtmggtaaagcaacmctgggtcgtatcatgaacgtactgggtcakccagtmgacatgaaaggcgacatcggtgaagaagagcgttgggctatccaccgcgctgcaccttcctacgaagagctgtctagctctcaggaattgctggaaaccggtatcaaagttatcgacctgatgtgtccgttcgctaagggcggtaaagtcggtctgttcggtggtgcsggtgttggtaaaaccgtaaacatgatggagctgatccgtaacatcgcgatcgagcactccggttactccgtgtttgcgggcgtaggtgaacgtactcgtgagggtaacgacttctaccacgaaatgaccgactccaacgttatcgataaagtatccctggtatatggccagatgaacgagccaccgggaaaccgtctgcgcgttgctctgaccggtctgaccatggctgagaaattccgtgacgaaggtcgtgacgtactgctgttcgtcgataacatctatcgttacaccctggccggtactgaagtatctgcwctgctgggtcgtatgccttcagcggtaggttaccagccgaccctggcggaagagatgggcgttctgcaggaacgtatcacctccaccaagaccggttctatc

SEQ ID NO: 319 - DNA, 831 bp, Kluyvera cryocrescens ATCC 33435
ttccctcaggatgccgtaccgcgtgtgtacgaagcccttgaggttcagaatggtaatgaagtgctggtgctggaagttcagcagcagctcggcggcggtatcgtacgtaccatcgctatgggttcttccgacggtctgcgtcgtggtctggatgtaaaagacctcgagcacccgatcgaagtcccggtaggtaaagcaacactgggtcgtatcatgaacgtactgggccaaccggtagacatgaaaggcgacatcggtgaagaagaacgttgggctatccaccgtgcagcaccttcctacgaagagctgtcaagctctcaggaactgctggaaaccggcatcaaagttatcgacctgatgtgtccgtttgcgaagggcggtaaagttggtctgttcggtggtgcgggtgtaggtaaaaccgtaaacatgatggagcttattcgtaacatcgcgattgagcactccggttattctgtgtttgcgggcgtaggtgaacgtactcgtgagggtaacgacttctaccacgaaatgaccgactccaacgttatcgataaagtttccctggtttacggccagatgaacgagccaccaggaaaccgtctgcgcgttgcgctgactggtctgactatggctgagaagttccgtgacgaaggtcgcgacgtactgctgttcgtcgataacatctatcgttacaccctggccggtacagaagtatctgcactgctgggtcgtatgccttcagcggtaggttaccagccgactctggcggaagagatgggcgttctgcaggaacgtatcacctccaccaaaaccggttctatcacctccgta

SEQ ID NO: 320 - DNA, 810 bp, Kluyvera georgiana ATCC 51603
gccgtaccgcgcgtgtacgaagcccttgaggtacagaatggtaatgaagtgctggtgctggaagttcagcagcagctcggtggcggtatcgtgcgtaccatcgccatgggttcctccgacggtctgcgtcgcggtctggaagttaaagatctcgagcacccgatcgaagttccggtaggtaaagcaacactgggtcgtatcatgaacgtactgggtcacccggtagacatgaaaggcgacatcggtgaagaagagcgttgggctatccaccgcgctgcgccttcctacgaagagctgtccagctctcaggaactgctggaaaccggtatcaaagttatcgacctgatgtgtccgttcgcgaagggcggtaaagtcggtctgttcggcggtgcgggtgttggtaaaaccgtaaacatgatggagctgatccgtaacatcgcgatcgagcactccggttactctgtgtttgcgggcgtaggtgaacgtactcgtgagggtaacgacttctaccacgaaatgaccgactccaacgttatcgataaagtatccctggtgtatggccagatgaacgagccgccgggaaaccgtctgcgcgttgcgctgaccggcctgaccatggctgagaaattccgtgacgaaggtcgtgacgtactgctgttcgtcgataacatctatcgttacaccctggccggtactgaagtatctgcactgctgggtcgtatgccttcagcggtaggttaccagccgactctggcggaagagatgggcgttctgcaggaacgtatcacctccaccaagaccggttctatc

SEQ ID NO: 321 - DNA, 834 bp, Lactobacillus acidophilus ATCC 4356
tcgataagaatttacctgatattaacaacgccttacgtgtaatcaagtccgaagatgaaagcatcgttcttgaagttacacttgaactcggtgatggtgttttaagaacaatcgccatggaatctaccgatggtcttcgtcgtggtatgaaagtcgaagatactggcgctccaatttcagttccagttggagaagacactttaggtcgtgtgtttaacgttttaggacagcctattgatggtggtccagcctttccaaaggatcacccacgtgagggtatccacaaggaagcacctaaatatgaagatttaactactagtcgtgaaattcttgaaactggtatcaaggttatcgaccttcttgaaccatatgttcgtggtggtaaagttggtttgtttggtggtgccggtgttggtaaaactactattattcaagaattaattcacaacatcgctcaagaacacggtggtatttccgtatttactggtgttggtgaaagaactcgtgaaggtaatgacctttactttgaaatgaaagcttcaggcgttttaagtaagactgccatggtatttggtcagatgaacgagccgcctggtgccagaatgcgtgttgcattaaccggtttgacacttgctgaatactttagagatgttgaaggtcaagacgtattgctctttattgacaatatctttagatttactcaggctggttcagaggtatctgctttgcttggtcgtatgccaagtgccgtaggttatcagccaactttggcaacagaaatgggtcaattgcaggaaagaattacttctactaagaagggttcaattacttcaa

SEQ ID NO: 322 - DNA, 824 bp, Legionella pneumophila subsp. pneumophila ATCC 33152
ttcctcgtgatagcgtgcctaaagtcaatgatgcgttaaagcttgttgatagtgatctggtttttgaagtgcagcagcaacttggagacggagttgtgcgtactattgccatgggaacaaccgatggtttaaagcgaggattaaaagcagaaaatacaggccatcctattcaagtgccagtaggtaagaaaactttgggacgcattatggatgttcttgggcgtcctgtagatgatgctgggcctatcgatgctgaagagacttgggctattcatcgtaaagcaccaagttatgaagagcaagctggcagccaggaattattggaaactggtattaaagtaattgatttgctttgcccttttgccaagggaggtaaagttggtctattcggtggtgccggtgtaggcaaaaccgttaacatgatggaattaatacgaaacattgcaattgagcatagcggttattcagtgtttgcaggggttggtgaacgtacccgtgaaggaaacgacttctatcatgagatgaaagactctaatgtattggataaagtatcgcttgtttatggtcagatgaatgagccgccaggaaaccgtttgcgtgttgctctaaccggtttgactatggctgaaaaattccgggatgaagggcgagacgttcttttgtttatcgataatatttatcgttataccttggctggggttgaagtatctgcgctgttaggccgtatgccttctgcagtaggatatcagccgacattagcagaggaaatgggtatgctgcaagagcgcattacctccacaaaaacaggttctattacttccata

SEQ ID NO: 323 - DNA, 818 bp, Leminorella grimontii ATCC 33999
gacgccgtaccgaaagtgtacgatgcgcttgaagttcaaattgatgccaagctggttctggaagttcaacagcagctcggcggcggcgttgttcgctgcatcgcgatgggtacttcagacggcttaagccgcggtctggacgtgctcgatctggaacacccgattgaagtaccggtgggcaaagcgacgctgggccgcatcatgaacgtgcttggtcaccctatcgacatgaagggcgacatcggcgaagaagagcgttgggctattcaccgcgcagcgccgagctacgaagacctgtcgggcgcaaccgagctgctggagaccggcatcaaggttatcgacctgatttgtccgttcgccaagggcggtaaagtcggcctgttcggcggcgccggcgtaggtaaaaccgtaaacatgatggagctcattcgcaacattgcgaccgagcactccggttactccgtgtttgcaggcgtaggtgaacgtacccgtgagggtaacgacttctaccacgaaatgactgaatccaacgtattggacaaggtgtcgctggtatacggtcagatgaacgagccgcctggaaaccgtctgcgcgtagcgttaacgggcttgaccatggcggagaagttccgtgatgaaggccgtgacgttctgctgtttatcgacaacatttaccgctataccctggccggtacggaagtatccgcactgctgggccgtatgccttcagccgtaggctaccagccgactctggctgaggaaatgggcgtgcttcaagagcgtattacctctaccaagacggggtctatcacctccgt

SEQ ID NO: 324 - DNA, 835 bp, Listeria monocytogenes
gtggaaacttacctgaaatctacaatgccctagttattgaatataaatctgatgcagaagaagcaccaactagccaacttactttagaagtagccatccaattaggtgatgatgttgtacgtacaatcgcaatggcatcaacagatggtgttcaaagaggtatggaagttattgatactgggagcccaattacagttcctgtaggtacagtaactcttggtcgtgtatttaatgtattaggaaacaccatcgatttggacgaaccacttccaagcgatattaaacgtaataaaattcaccgcgaagctccaactttcgatcaattagcaacgacaacagaaattcttgaaacaggaattaaagtagttgacttgctagctccttacttaaaaggtggtaaaatcggattgttcggtggtgccggtgttggtaaaaccgttctaattcaagagcttatccataatatcgcacaagaacatggtggtatttctgtgttcgctggcgttggagaacgtactcgtgaaggtaacgacctttacttcgaaatgaaagattcaggcgttattgaaaaaacagcgatggtattcggtcaaatgaacgagccaccaggtgcgcgtatgcgtgttgccttaactggtctaacaattgctgaatatttccgtgatgaagaacatcaagatgtacttttattcattgataacattttccgtttcacacaagctggttcagaggtttcggctttactaggtcgtatgccatctgcggtaggttaccaaccaaccctagctactgaaatgggtcaactacaagaacgtattacatctactaacgttgg

SEQ ID NO: 325 - DNA, 828 bp, Micrococcus lylae ATCC 27566
cccgcgtggcgagttgccggcactgttcaacgcgctgactgtcgaggtcaccctcgaagcagtcgctaaaaccattacccttgaggttgctcagcacctcggcgacaacttggttcgtgccgtgtccatggcaccgaccgacggtctcgtccgtggcgctgctgtgatcgacagcggtaagccgatctcagttcccgttggtgacgtagtcaagggacacgtcttcaacgctctgggtgattgcctcgatgagccaggtcttggccgtgacggtgagcagtggggcatccaccgcgatccgccaccttttgaccagcttgagggtaagaccgagattctggaaaccggtattaaggtcatcgacctgctgaccccgtatgttaagggcggcaagatcggcctgttcggtggtgctggtgtgggtaagaccgttcttatccaggaaatgatcacccgtatcgctcgcgagttctccggtacctcggtgttcgcaggcgtgggtgagcgtacccgtgagggcaccgacctcttcctggaaatggaagagatgggcgttctccaggacaccgctcttgtgttcggccagatggacgagcctccaggagttcgtatgcgcgtggcgctgtccggcctgaccatggcggagtacttccgcgatgtgcagcaccaggacgtgcttctgttcatcgacaacatcttccgtttcacccaggcaggttccgaggtttccaccctcctaggccgcatgccttctgccgtgggttaccagccaacgctggcagacgagatgggtgttctgcaggagcgtattacctccacaaagggtaa

SEQ ID NO: 326 - DNA, 822 bp, Moellerella wisconsensis ATCC 35017
gatgccgtaccaaaagtgtacgatgctcttgaggttcttaacggtaaagaaaaattggtgctggaagttcagcaacaattaggcggtggtgttgttcgttgtatcgcaatgggtacatcagatggtttaagccgcggtttagaagttaaaaatacagatcatccgatcgaagttcctgtcggtgttaaaacgcttggccgtatcatgaacgtgctgggtgacccaatcgacatgaaaggtgatatcggcgaagaagaacgctggtcaattcaccgcgcagcaccaagctatgaagatctggctaactcaacagaacttctagaaacaggtatcaaagttatggacctgatttgcccattcgctaaagggggtaaagtgggtctgttcggtggtgcgggtgtcggtaaaacagttaacatgatggagcttattcgtaatatcgcgattgagcactcaggttattctgtattcgcgggtgttggtgaacgtactcgtgaaggtaacgatttctaccatgaaatgacagactcaaacgttctggataaagtttcattggtttatggccagatgaatgagccaccaggaaaccgtctgcgtgttgctctgactggtctgactatggcagagaaattccgtgacgaaggtcgtgacgtactgttattcgtagataatatttatcgttataccttagcagggacagaagtatctgcactgctgggtcgtatgccttcagcggtgggttatcagccaacgctggcggaagagatgggtgttctgcaagaacgtatcacctcgactaagaccggctctatcacttccgta

SEQ ID NO: 327 - DNA, 854 bp, Branhamella catarrhalis ATCC 43628
ccgtggcgatgtcccccaaatctttgatgcacttcatgttgatggtactgaaaccacccttgaagtccaacaacagttaggtgatggtgtggtgcgtaccattgccatgggttctaccgaaggcttaaagcgtggcttgcctgtctctaattcaggtgcacccatttcggtaccagtcggtcaagcaacactgggtcgcattatggatgtcctaggtcgcccaatcgatgaagcaggtccggtaaatgctgaacaaaaatggtccattcatcgtgaagcaccaagttatgatgaacagtcaaatagtacagaacttttagaaacaggcatcaaagtgattgatttgctttgtccatttgccaaaggtggtaaagtcggtctgttcggtggtgctggtgttggtaagaccgttaacatgatggagcttatcaataatatcgccctaaaacactcaggtctgtcggtttttgctggtgtgggtgagcgtactcgtgagggtaatgacttctaccatgaaatgcaagaagcaggcgttgttaataccgaagattttactcagtcaaaagttgccatggtttatggtcagatgaatgagccaccaggaaaccgtctgcgtgttgccttaactggtttgaccatggcagagtatttccgtgatgaaaaagacgaagcaacgggcaaaggccgtgatgttctgctgttcgttgataatatttatcgttacacattggcaggtactgaggtatcagcacttttaggtcgtatgccatctgcggtaggttatcagccgactttggccgaagagatgggcttgctacaagagcgtatcacctccacccaatcaggctcaatta

SEQ ID NO: 328 - DNA, 831 bp, Moraxella osloensis ATCC 19976
ccgtcaaagcgtaccaagaatttatgatgccttaaaagttgaaggcacagaaactacattagaagtacaacaacaattgggtgatggtatcgtacgtactattgccatgggttctactgaaggtctaaaacgtggtctaccagttagcaacactggcgcaccaatctctgtacctgtgggtaaaggtacactaggtcgtatcatggacgttttaggacacccaatcgatgaggcaggtccggtagagcatagtaacacttgggcgattcaccgtgaagcgccaagctatgatgaacaatcaaactctactgaacttttagaaaccggtattaaagtaattgacttactatgcccatttgctaaaggtggtaaagtcggtctgttcggtggcgcgggtgttggtaaaaccgttaacatgatggaacttatcaataacatcgcaaaagcacactcaggtttatcggtatttgctggtgtaggtgagcgtactcgtgaaggtaatgacttctaccacgagatgaaagactcaaacgtacttgataaagttgcgatggtgtatggtcagatgaatgagccaccaggaaaccgtttacgtgttgccctgacaggtttaaccatggcagaatacttccgtgacgaaaaagatgaaaacggtaaaggtcgtgacgtattattgttcgttgacaatatttatcgttacacgctagcgggtaccgaagtatcagcattattaggtcgtatgccatctgcagtagggtatcagccaacgcttgcagaagagatgggtgtactacaagaacgtattacttcaacccaatcaggctctattac

SEQ ID NO: 329 - DNA, 835 bp, Morganella morganii subsp. morganii ATCC 25830
cgaatttcctcaggatgcagtaccgaaagtgtacgatgcgcttgaggtaacaaatggtaaagaaaaactggtgctggaagttcagcagcagttaggcggcggggttgtccgttgtatcgctatgggtacatctgatggtctgagccgtaatctggaagtaaccgatttaggccacccgatcgaagtccctgtcggcgtgaaaaccttaggacgtatcatgaacgttctgggtgatccgatcgatatgaaaggtgacatcggcgcagaagaaaaatggtctattcaccgtgctgcaccaacatacgaagaactgtctaactcccaggaactgctggaaacaggtatcaaagtaatggacctgatctgcccgttcgcgaagggtggtaaagtcggtctgttcggtggtgcgggtgtgggtaaaaccgtaaacatgatggaactgatccgtaacatcgcgatcgagcactccggttactctgtattcgcaggggtcggtgagcgtacccgtgaaggtaacgacttctatcatgaaatgacagactccaacgttctggacaaagtatcactcgtgtacggccagatgaacgagccaccgggaaaccgtctgcgcgttgctctgaccggtctgaccatggcggaaaaattccgtgatgaaggccgcgatgtactgctgttcgttgataacatctaccgttataccctggccggtactgaagtatccgcgctgttaggccgtatgccttcagcggtaggttaccagccgacactggcggaagaaatgggtgtgcttcaggaacgtatcacatcgaccaaaacaggctctatcacgtctgta

SEQ ID NO: 330 - DNA, 824 bp, Pantoea agglomerans ATCC 27155
gacgcggtaccgcaagtgtacagcgccctcgaggttatgaatggtgatgcgcgtctggtgctggaagttcagcagcagctcggcggcggcgtagtacgtaccatcgcaatgggtacgtctgacggcctgaagcgtggtctgagcgtcaacgacctgcagaaaccgattcaggtacccgtcggtaaagcgaccctgggccgtatcatgaacgttctcggcgagccaatcgatatgaaaggcgagctgaaagaagaagatggcagcgcagtagagatcgcctctattcaccgcgcagccccttcttatgaagatcagtctaactcgcaggaactgctggaaaccggcatcaaggttatcgacctgatgtgtccgtttgctaaaggcggtaaagtcggtctgttcggtggtgcgggtgtaggtaaaaccgtcaacatgatggaactgatccgtaacatcgcggctgaacactcaggttactcagtgtttgccggtgtgggtgagcgtactcgtgagggtaacgacttctaccacgaaatgactgactctaacgttatcgataaagttgcactggtctatggccagatgaacgagccgccgggtaaccgtctgcgcgtagcactgaccggtctgaccatggcggaaaaattccgtgatgaaggtcgcgacgttctgctgttcatcgataacatctaccgttataccctggccggtacagaagtttctgcactgctgggtcgtatgccatctgcggtaggttaccagccaacgctggcagaagagatgggtgtgttgcaggagcgtattacctccaccaagaccggttc

SEQ ID NO: 331 - DNA, 808 bp, Pantoea dispersa ATCC 14589
tatacagcgctctcgaggtaaaaaatggtgatgctcgtctggtgctggaagtacagcagcagctgggcggtggcgtggtgcgtaccatcgccatgggttcttctgacggcctgaagcgcggtctggaagtcaccgacctgaaaaaacctatccaggttccggttggtaaagcaacactcggccgtatcatgaacgtgctgggtgagccaatcgacatgaaaggcgacctgaaagaagaagacggcagcgctgtagaggtttcctctattcatcgcgcagcgccttcttatgaagatcagtcaaactcgcaggaactgctggaaaccggcatcaaggttatcgacctgatgtgtccgttcgcgaagggcggtaaagtcggtctgttcggtggtgcgggtgtaggtaaaaccgtaaacatgatggagctgatccgtaacatcgcggctgagcactcaggttattcggtctttgccggcgtgggtgagcgtactcgtgagggtaacgacttctaccacgaaatgacggactccaacgttatcgataaagtagcgctggtgtatggccagatgaacgagccgccgggtaaccgtctgcgcgtagcactgaccggtctgaccatggcggaaaaattccgtgatgaaggccgtgacgttctgctgttcatcgacaacatctaccgttacaccctggccggtacagaggtttctgcactgctgggtcgtatgccatcggcggtaggttatcagccaacgctggctgaagagatgggtgtgctgcaggagcgtattacctccaccaagaccggttc

SEQ ID NO: 332 - DNA, 805 bp, Pasteurella multocida NCTC 10322
gatgcagtaccaaaagtatatgatgccttaaatgttgaaacaggtttagtacttgaagttcaacaacaattaggtggtggtgtagttcgctgtatcgcaatgggatcatctgatggattaaaacgcggtttaagcgtaacaaatacgaataacccaatttctgttccagtgggaacgaaaacattgggtcgtatcatgaacgtattgggtgaaccaatcgatgagcaaggtgaaatcggtgcagaagagaattggtctattcaccgtgcgccaccaagttatgaagaacaatctaacagtactgaacttttagaaacgggaattaaagttatcgacttagtttgtccgtttgcgaaagggggtaaagtaggtttattcggtggtgcgggtgtcggtaaaaccgtcaatatgatggaattaatccgtaacatcgcaattgagcactcaggttactctgtctttgcgggggtaggtgagcgtacgcgtgaaggtaacgacttctatcatgagatgaaagactctaacgtattagataaagtgtctcttgtttatggtcaaatgaacgagccaccaggtaaccgtttacgtgtggcattaacaggcttaactatggcggaaaaattccgtgatgaaggtcgtgatgtcttattcttcgttgataatatttatcgttatactcttgctggtacagaagtttctgcattattaggtcgtatgccatctgcggtaggttatcaaccaacccttgcagaagaaatgggtgttctgcaagagcgtattacctcaaccaaaacaggttctatta

SEQ ID NO: 333 - DNA, 828 bp, Pragia fontium ATCC 49100
tttcctcaagacgccgtaccaaaagtgtacgacgcgcttgaagttcagaacgatgccaagctggtgctggaagttcaacaacagctcggtggtggtgtcgttcgttgtatcgcaatgggtacttccgatggcttaagccgcggtttaaaagtgcttgatttagaacatcctatcgaagtaccggttggtactgcgacgctgggccgtattatgaacgtgctcggtcagccaatcgatatgaaaggcgatattggtgaagaagagcgttgggctattcaccgtgaagcaccaagttatgaagatttatctggcgccaatgaactgctggaaacgggtatcaaggttatcgacctgatttgtccgtttgctaaaggtggtaaagttggtctgtttggtggtgcgggtgtaggtaaaaccgtaaacatgatggagctgattcgtaacattgcgactgagcactcaggttactccgtattcgccggtgtaggggaacgtacccgtgaaggtaatgacttctaccacgaaatgaccgaatcaaacgtactggataaagtatctctggtttatggccagatgaacgagccaccaggaaaccgtctgcgcgtggcgttaacgggtttgaccatggctgaaaaattccgtgatgaaggtcgtgacgttctgttatttatcgataacatttatcgctataccttagccggtaccgaagtatcagcactgttggggcgtatgccatcagcggtaggttatcagccaacgttagcagaagagatgggtgtgttgcaggaacgtattacttcaaccaaaaccggttcaatcacttctgta

SEQ ID NO: 334 - DNA, 807 bp, Proteus mirabilis ATCC 25933
gtccctaaagtatacgacgctcttgaggttatgaatggtaaagaaaaactggtgctggaagttcagcaacagttaggcggtggtatcgttcgttgtatcgcaatgggtacatcagacggtttaagccgtggcttaaaggttgaagatttaggccacccaattgaagtaccagtaggtaaagcgactttaggacgtatcatgaacgttctgggtacacctattgatatgaaaggtgagattgaaaccgaagagcgttggtcaatccaccgtgaagcaccaacttacgaagagttatcaaactctcaagaactgcttgaaaccggtatcaaagttatggacttaatctgtccatttgctaaaggtggtaaagtcggtctgttcggtggtgcgggtgttggtaaaacagttaacatgatggaattgatccgtaatatcgcgatcgagcactcaggttactctgtatttgctggtgttggtgagcgtactcgtgagggtaacgacttctatcatgaaatgacagattctaacgttcttgacaaagtatcgttagtttacggtcagatgaatgagccaccaggaaaccgtctgcgtgttgcactgactggtctgactatggctgagaaattccgtgatgaaggccgtgacgtactgttattcgtcgataacatctatcgttacaccttagccggtacagaagtatcagcactgttaggtcgtatgccatcagcggtaggttaccaaccaacattggctgaagagatgggtgttctgcaagagcgtatcacttcaaccaaaacaggttctatc

SEQ ID NO: 335 - DNA, 811 bp, Proteus vulgaris ATCC 13315
ccctaaagtatacgacgctcttgaggttatgaatggtaaagagaaactggtgctagaagttcagcaacagttaggcggtggtatcgttcgttgtatcgcaatgggtacatcagacggtttaagccgtggcttaaaagttgaaaacttaggccacccaattgaagtaccagtaggtaaagcaacactgggacgtatcatgaacgttctgggtacacctatcgatatgaaaggtgatattgcaactgaagaacgttggtctattcaccgcgaagcgccaacctatgaagagttatcaagctctcaagaactactagaaaccggtatcaaagtaatggacttaatctgtccgtttgctaaaggtggtaaagtaggtctcttcggtggtgcgggtgttggtaaaacagttaacatgatggaattgatccgtaacatcgcgattgagcactcaggttattctgtatttgcaggtgttggtgagcgtactcgtgagggtaacgacttctatcatgaaatgacagattctaacgttcttgacaaagtatcgttagtttatggtcagatgaatgagccaccaggaaaccgtctacgtgtagcactgacgggtttaaccatggcggaaaaattccgtgatgaaggccgtgacgtactgttattcgtcgataacatctatcgttacaccttagccggtaccgaagtatcagcactgttaggccgtatgccatcagcagtaggttaccaaccaacattggctgaagagatgggtgttctgcaagaacgtatcacttcaaccaaaacaggttcaatcacctct

SEQ ID NO: 336 - DNA, 806 bp, Providencia alcalifaciens ATCC 9886
tcaagataacgtaccaaaagtgtacgatgctcttgaggttattaacggtaaagaaaaactggtgttggaagttcaacaacagttaggtggtggtgttgtccgttgtatcgcaatgggtacatcagatggtctgagccgtggtttagaagttgtaaacttagagcacccaatcgaagtaccagtcggtaaagcaactctgggacgtatcatgaacgttctgggtgaaccaatcgacatgaaaggtgatatcggcgaagaagagcgctggtctattcaccgtgctgcaccaagctacgaagaattagctaactcaactgaactgctggaaaccggtatcaaagtaatggacttaatctgtccattcgcgaaaggtggtaaagtaggtctgttcggtggtgcgggtgttggtaaaaccgtaaacatgatggaactgatccgtaacatcgcgattgagcactcaggttactcagtgttcgctggtgttggtgagcgtacccgtgaaggtaacgacttctatcatgaaatgacagactcaaacgttctggataaagtatcactggtttatggccagatgaacgagccaccaggaaaccgtctgcgtgttgcgctgactggtctgactatggctgaaaaattccgtgacgaaggtcgtgacgtactgctgttcgttgacaacatttatcgttatacactggcaggtactgaagtatcagcactgttaggtcgtatgccatcagcggtaggttaccaaccaacgctggcggaagagatgggtgttcttcaagaacgtattacctcaactcaaa

SEQ ID NO: 337 - DNA, 830 bp, Providencia rettgeri ATCC 9250
ttccctcaagatgacgtaccaaaagtgtacgacgctcttgaggttgttaacggtaaagaaacactggtgctggaagttcagcaacagttaggcggtggtgttgtccgttgtatcgcaatgggtacatcagatggcctgagccgtggtttagaagttgtaaacttagagcacccaattgaagtaccagtaggtaaagcaactttaggacgtatcatgaacgttctgggtcagcctattgatatgaaaggtgatatcggcgaagaagagcgctggtcaattcaccgtgctgcacctagctacgaagagttagctaactcaacagagctgctggaaaccggtatcaaagtaatggacttaatctgtccattcgcgaaaggtggtaaagttggtctgttcggtggtgcgggtgttggtaaaacagtaaacatgatggaactgatccgtaacatcgcgattgagcactcaggttactcagtattcgctggtgttggtgagcgtactcgtgaagggaacgacttctatcatgaaatgactgactcaaacgttctggataaagtatcactggtttatggccagatgaatgagccaccaggaaaccgtctgcgcgttgcgttgactggtctgactatggctgaaaaattccgtgacgaaggtcgtgacgtactactgttcgttgacaacatctatcgttatacactggcaggtactgaagtatcagcactgttaggtcgtatgccttcagcggtaggttatcagccaacgctggcggaagagatgggtgttctgcaagaacgtattacctcaactcaaacgggttctatcacttccgt

SEQ ID NO: 338 - DNA, 812 bp, Providencia rustigianii ATCC 33673
agcgtaccaaaagtgtacgatgctcttgaggttattaacggtaaagaaaaactggtgttggaagttcagcagcagttaggcggtggtgttgtccgttgtatcgcaatgggtacatcagatggtctgagccgtggtttagaagttgtaaacttagaacacccaattgaagtaccagtaggtaaagcaactctgggacgtatcatgaacgttctgggtgaccctattgatatgaaaggtgatatcggcgaagaagagcgctggtctattcaccgttcagcgccaagctatgaagaattagctaactcaacagaactgctagaaaccggtatcaaagtaatggacttaatctgtccattcgcgaaaggtggtaaagttggtctgttcggtggtgcgggtgttggtaaaacagtaaacatgatggaactgatccgtaacatcgcgattgagcactcaggttactcagtattcgctggtgttggtgagcgtacccgtgaaggtaacgacttctatcatgaaatgactgattctaacgttctggataaagtatcactggtttatggccagatgaacgagccaccaggaaaccgtctgcgtgttgcgctgactggtctgactatggctgaaaaattccgtgacgaaggtcgtgacgtactgctgttcgttgacaacatttatcgttatacactggcaggtactgaagtatcagcactgttaggtcgtatgccttcagcggtaggttatcagccaacattggcagaagagatgggtgttctacaagaacgtatcacttctaccaaaaccggttctatcac

SEQ ID NO: 339 - DNA, 819 bp, Providencia stuartii ATCC 33672
tcaagatgcagtaccaaaagtgtacgatgcgcttgaggttgttaacggtaaagaaaaactggtgctggaagttcagcaacagttaggcggtggtgttgtccgttgtatcgcaatgggtacatcagatggcctaagccgtggtttagaagttaaaaatttagaacacccaattgaagtaccagtaggtaaagcaacactcggacgtatcatgaacgttctgggtgaccctattgatatgaaaggtgatatcggcgaagaagagcgttggtctattcaccgcgctgcaccaagctacgaagagctatcgagctcaactgaactgctagagacaggtatcaaagtcatggacttgatctgtccattcgcgaaaggtggtaaagttggtctgttcggtggtgcgggtgttggtaaaacggtaaacatgatggaacttatccgtaacatcgcgattgagcactcaggttactcagtattcgcaggtgttggtgagcgtacccgtgaaggtaacgacttctatcatgaaatgacagattcaaacgttcttgacaaagtatcactggtttatggtcagatgaatgagccaccaggaaaccgtctacgcgtagcattgactggtttgactatggctgagaaattccgtgacgaaggccgtgatgttctgttgttcgtggataacatctatcgttatacactggcaggtacagaagtatcggctctgttaggtcgtatgccatcagcagtaggttatcagccaacattggcagaagagatgggtgttcttcaagaacgtatcacttctactaagacaggttctatcac

SEQ ID NO: 340 - DNA, 857 bp, Psychrobacter phenylpyruvicus ATCC 23333
aaccgcactgacgtgcctcaaatttatgacgcgttagttgtagatggtaccgaaaccaccctagaagttcagcagcagctgggcgatggtgtggtacgtactattgcaatgggatctactgaaggtcttaagcgtggtttaccagtaacaaacactggtgccccaattacagttccagtaggtgatgcgactttaggtcgtattatggacgttttaggtcgtccaattgacgaacaaggtccagttaattctgaagaccattggtcaatccaccgtcaagcgccatcatatgatgagcaagctaacagtactgacctattagagacaggtattaaagtaattgacttactttgtccgttcgctaaagggggtaaagttggtctgttcggtggtgccggtgttggtaaaaccgtaaacatgatggaattgattaataacatcgctcttaagcactcaggtttatcagtattcgctggtgtgggtgagcgtactcgtgaaggtaacgacttctaccacgagatgcaagaagcgggtgttgttgacgttgaaaacttcaccaactcaaaagttgcgatggtttatggtcagatgaatgagccaccaggtaaccgtttacgtgttgcgttaaccggtctgactatggctgagtacttccgtgatcaaaaagatgaaaacggtaaaggtaaagacgttctattattcgttgataacatctaccgctacacgctagccggtactgaagtatcagcacttctaggtcgtatgccatcagcagtaggttatcagccaacactagcggaagagatgggtgtactacaagagcgtattacttcaactcagactggttctattacttc

SEQ ID NO: 341 - DNA, 832 bp, Rahnella aquatilis DSM 4594
gttccctcaggatgcagtaccgaacgtgtacaatgctcttgaggtagaaaacggtacctccaaactggtgctggaagttcagcaacagttaggcggcggcgttgttcgttgtatcgcaatgggtacctcagacggcctgcgtcgcggtctgaaagtgaacaacctggaacacccaattgaagtaccggtaggtaaagcgactctgggtcgtatcatgaacgtattgggtgaaccaatcgacatgaaaggtgaaatcggcgaagaagaacgtcgtgctattcaccgtgctgcgccttcttatgaagagctggcaaactcccaggaattgctggaaaccggtatcaaagttatggacctgatgtgtccgttcgctaagggcggtaaagttggtctgttcggtggtgcgggtgtaggtaaaactgtgaacatgatggagctgatccgtaacattgcgatcgagcactccggttattctgtgtttgcaggcgtgggtgaacgtactcgtgagggtaacgacttctaccacgaaatgactgattccaacgttatcgacaaagtttccctggtgtatggccagatgaatgagccaccaggtaaccgtctgcgcgttgcactgaccggcctgaccatggcggaaaaattccgtgatgaaggtcgtgacgtactgctgttcgttgacaacatttaccgttacaccctggccggtaccgaagtgtccgcacttctgggccgtatgccatcggcggtaggttatcagccaacgctggcggaagagatgggcgctctgcaagaacgtatcacctcgaccaaaagtggttctatcacctccgta

SEQ ID NO: 342 - DNA, 824 bp, Salmonella choleraesuis subsp. arizonae ATCC 13314
ttccctcaggatgccgtaccacgcgtgtacgatgctcttgaggtgcagaatggtaatgagaagctggtgctggaagttcagcagcagcttggcggcggtatcgtgcgtaccatcgcgatggggtcttctgacggtctgcgtcgcggtcttgatgtaaaagatctcgaacacccgatcgaagtcccggtaggtaaagccacgctgggtcgtatcatgaacgtcctgggcgaaccggtcgatatgaaaggcgagatcggcgaagaagagcgttgggctattcaccgcgcggcgccgtcctacgaagagttgtcaaactctcaggaactgctggaaaccggtataaaagttatcgacctgatgtgtccgttcgcgaagggcggtaaagtcggtctgttcggtggcgcgggtgtaggtaaaaccgtaaacatgatggagcttatccgtaacatcgcgatcgagcactccggttactctgtgtttgcgggcgtaggtgaacgtactcgtgagggtaacgacttctaccacgaaatgaccgactctaacgttatcgataaagtatccctggtgtatggccagatgaacgagccaccgggaaaccgtctgcgcgttgcattgaccggcctgaccatggcggaaaaattccgtgatgaaggtcgtgacgttctgctgttcgtcgacaacatctaccgttataccctcgccggtacggaagtatccgcactgctgggtcgtatgccttccgcggtaggttaycasccgactctggcggaagagatgggcgttctgcaggaacgtatcacctccaccaaaaccggttctatcac

SEQ ID NO: 343 - DNA, 820 bp, Salmonella choleraesuis subsp. choleraesuis ATCC 7001
gatgccgtaccacgcgtgtacgatgcccttgaggtgcagaatggtaatgagaagctggtgctggaagttcagcagcagcttggcggcggtatcgtgcgtaccatcgcgatggggtcttctgacggtctgcgtcgcggtctggatgtaaaagatctcgaacacccgatcgaagtcccggtaggtaaagccacgctgggtcgtatcatgaacgtcctgggcgaaccggtcgacatgaaaggcgagatcggcgaagaagagcgttgggcgattcaccgcgcagcaccttcctacgaagagttgtcaaactctcaggaactgctggaaaccggtatcaaagttatcgacctgatgtgtccgttcgcgaagggcggtaaagtcggtctgttcggtggtgcgggtgtaggtaaaaccgtaaacatgatggagcttattcgtaacatcgcgatcgagcactccggttactcagtgtttgcgggcgtaggggaacgtactcgtgagggtaacgacttctaccacgaaatgaccgactccaacgttatcgataaagtatccctggtgtatggccagatgaacgagccgccgggaaaccgtctgcgcgttgcactgaccggcctgaccatggcggagaaattccgtgacgaaggtcgtgatgtactgctgttcgtcgataacatctatcgttacaccctggccggtacggaagtatccgcactgctgggccgtatgccttccgcagtaggttaccagccgactctggcggaagagatgggcgttctgcaggaacgtatcacctccaccaaaaccggttctatcacctccg

SEQ ID NO: 344 - DNA, 831 bp, Salmonella choleraesuis subsp. diarizonae ATCC 43973
ttccctcaggatgccgtaccacgcgtgtacgatgctcttgaggtgcagaatggtaatgagaagctggtgctggaagttcagcagcagcttggcggcggtatcgtgcgtaccatcgcgatggggtcttctgacggtctgcgtcgcggtcttgatgtaaaagatctcgaacacccgatcgaagtcccggtaggtaaagcaacgctgggtcgtatcatgaacgtcctgggtgaaccggtcgatatgaaaggcgagatcggcgaagaagagcgttgggcgattcaccgcgcggcgccgtcctacgaagagttgtcaaactctcaggaactgctggaaaccggtatcaaagttatcgacctgatgtgtccgttcgcgaagggcggtaaagtcggtctgttcggtggcgcgggtgtaggtaaaaccgtaaacatgatggagcttatccgtaacatcgcgatcgagcactccggttactctgtgtttgcgggcgtaggtgaacgtactcgtgagggtaacgacttctaccacgaaatgaccgactctaacgttatcgataaagtatccctggtgtatggccagatgaacgagccaccgggaaaccgtctgcgcgttgcattgaccggcctgaccatggcggaaaaattccgtgatgaaggtcgtgacgttctgctgttcgtcgacaacatctaccgttataccctcgccggtacggaagtatccgcactgctgggtcgtatgccttccgcggtaggttatcagccgactctggctgaagaaatgggcgttctgcaggaacgtatcacctccaccaaaaccggttctatcacctccgta

SEQ ID NO: 345 - DNA, 831 bp, Salmonella choleraesuis subsp. houtenae ATCC 43974
ttccctcaggatgccgtaccacgcgtgtacgatgctcttgaggtgcagaatggtaatgagaagctggtgctggaagttcagcagcagcttggcggcggtatcgtacgtaccatcgcgatggggtcttctgacggtctgcgtcgcggtctggatgtaaaagatctcgaacacccgatcgaagtcccggtaggtaaagctacgctgggtcgtatcatgaacgtcctgggcgaaccggtcgatatgaaaggcgagatcggcgaagaagagcgttgggcgattcaccgcgctgcgccgtcctacgaagagttgtcaaactctcaggaactgctggaaaccggtatcaaagttatcgacctgatgtgtccgttcgcgaagggcggtaaagtcggtctgttcggtggcgcgggtgtaggtaaaaccgtaaacatgatggagcttatccgtaacatcgcgatcgagcactccggttactccgtgtttgcgggcgtaggtgaacgtactcgtgagggtaacgacttctaccacgaaatgaccgactccaacgttatcgataaagtatccctggtgtatggtcagatgaacgagccgccgggaaaccgtctgcgcgttgcattgaccggcctgaccatggcggaaaaattccgtgacgaaggtcgtgacgttctgctgttcgtcgataacatctatcgttacaccctggccggtacggaagtatccgcactgctgggtcgtatgccttccgcggtaggttatcagccgacgctggcggaagagatgggcgttctgcaggaacgtatcacctccaccaagaccggttctatcacctccgta

SEQ ID NO: 346 - DNA, 829 bp, Salmonella choleraesuis subsp. indica ATCC 43974
ttccctcaggatgccgtaccacgcgtgtacgatgcccttgaggtgcagaatggtaatgagaagctcgtgctggaagttcagcagcagcttggcggcggtatcgtgcgtaccatcgcgatggggtcttctgacggtctgcgtcgcggtctggatgtaaaagatctcgaacacccgatcgaagtcccggtaggtaaagccacgctgggtcgtatcatgaacgtcctgggcgaaccggtcgatatgaaaggcgagatcggcgaagaagagcgttgggcgattcaccgcgcggcgccgtcctatgaagagttgtcaaactctcaggaactgctggaaaccggtatcaaagttatcgacctgatgtgtccgttcgcgaagggcggtaaagtcggtctgttcggtggtgcgggcgtaggtaaaaccgtaaacatgatggagcttatccgtaacatcgcgatcgagcactccggttactctgtgtttgcgggcgtaggtgaacgtactcgtgagggtaacgacttctaccacgaaatgaccgactccaacgttatcgacaaagtatccctggtgtatggccagatgaacgagccgccgggaaaccgtctgcgcgttgcactgaccggcctgaccatggcggagaagttccgtgacgaaggtcgtgacgtactgctgttcgtcgataacatctatcgttataccctggccggtacggaagtttccgcactgctgggtcgtatgccttccgcggtaggttatcagccaactctggcggaagagatgggcgttctgcaggaacgtatcacctccaccaaaaccggttctatcacctccg

SEQ ID NO: 347 - DNA, 817 bp, Salmonella choleraesuis subsp. choleraesuis ATCC 9150
gccgtaccacgcgtgtacgatgcccttgaggtgcagaatggtaatgagaagctggtgctggaagttcagcagcagcttggcggcggtatcgtgcgtaccatcgcgatggggtcttctgacggtctgcgtcgcggtctggatgtaaaagatctcgaacacccgatcgaagtcccggtaggtaaagctacgctgggtcgtatcatgaacgtcctgggcgaaccggtcgacatgaaaggcgagatcggcgaagaagagcgttgggcgattcaccgcgcagcgccttcctacgaagagttgtcaaactctcaggaactgctggaaaccggtatcaaagttatcgacctgatgtgtccgttcgcgaagggcggtaaagtcggtctgttcggtggtgcgggtgtaggtaaaaccgtaaacatgatggagcttatccgtaacatcgcgatcgagcactccggttactctgtgtttgcgggcgtaggtgaacgtactcgtgagggtaacgacttctaccatgaaatgaccgactccaacgttatcgataaagtatccctggtgtatggccagatgaacgagccgccgggaaaccgtctgcgcgttgcactgaccggcctgaccatggcggagaaattccgtgacgaaggtcgtgacgtactgctgttcgtcgataacatctatcgttacaccctggccggtacggaagtatccgcactgctgggtcgtatgccttccgcggtaggttaccagccgactctggcggaagagatgggcgttctgcaggaacgtatcacctccaccaagaccggttctatcacctccg

SEQ ID NO: 348 - DNA, 806 bp, Salmonella choleraesuis subsp. choleraesuis ATCC 8759
gccgtaccacgcgtgtacgatgcccttgaggtgcagaatggtaatgagaagctggtgctggaagttcagcagcagcttggcggcggtattgtgcgtaccatcgcgatggggtcttctgacggtctgcgtcgcggtctggatgtaaaagatctcgaacacccgatcgaagtcccggtaggtaaagccacgctgggtcgtatcatgaacgtcctgggcgaaccggtcgacatgaaaggcgagatcggcgaagaagagcgttgggcgattcaccgcgcagcgccttcctacgaagagttgtcaaactctcaggaactgctggaaaccggtatcaaagttatcgacctgatgtgtccgttcgcgaagggcggtaaagtcggtctgttcggtggtgcgggtgtgggtaaaaccgtaaacatgatggagcttatccgtaacatcgcgatcgagcactccggttactctgtgtttgcgggcgtaggtgaacgtactcgtgagggtaacgacttctaccacgaaatgaccgactccaacgttatcgataaagtatccctggtgtatggccagatgaacgagccgccgggaaaccgtctgcgcgttgcattgaccggtctgaccatggcggagaaattccgtgacgaaggtcgtgacgtactgctgttcgtcgataacatctatcgttacaccctggccggtacggaagtatccgcactgctgggccgtatgccttccgcagtaggttaccagccgactctggcggaagagatgggcgttctgcaggaacgtatcacctccaccaaaaccggttc

SEQ ID NO: 349 - DNA, 831 bp, Salmonella choleraesuis subsp. salamae ATCC 43972
ttccctcaggatgccgtaccacgcgtgtacgatgcccttgaggtgcagaatggtaatgagaagctggtgctggaagttcagcagcagcttggcggcggtatcgtgcgtaccatcgcgatggggtcttctgacggtctgcgtcgkggtctggatgtaaaagatctcgaacacccgatcgaagtcccggtaggtaaagcaacgctgggccgtatcatgaacgtactgggcgaaccggtcgacatgaaaggcgagattggtgaagaagagcgttgggctattcaccgtgctgcgccgtcctacgaagagttgtcaaactctcaggaactgctggaaaccggtatcaaagttatcgacctgatgtgtccgttcgcgaagggcggtaaagtcggtctgttcggtggcgcgggtgtaggtaaaaccgtaaacatgatggagctcatccgtaacatcgcgatcgagcactccggttactccgtgtttgcgggcgtaggtgaacgtactcgtgagggtaacgacttctaccacgaaatgaccgactccaacgttatcgataaagtatccctggtgtatggccagatgaacgagccgccgggaaaccgtctgcgcgttgcactgaccggcctgaccatggcggaaaaattccgtgacgaaggtcgtgacgtactgctgttcgtcgataacatctatcgttataccctggccggtacggaagtatccgcactgctgggtcgtatgccttccgcggtaggttatcagccgacgctggcggaagagatgggcgttctgcaggaacgtatcacctccactaaaaccggttctatcacctccgta

SEQ ID NO: 350 - DNA, 823 bp, Salmonella choleraesuis subsp. choleraesuis ATCC 10749
ttccctcaggatgccgtaccacgcgtgtacgatgcccttgaggtgcagaatggtaatgagaagctggtgctggaagttcagcagcagcttggcggcggtatcgtgcgtaccatcgcgatggggtcttctgacggtctgcgtcgcggtctggatgtaaaagatctcgaacacccgatcgaagtcccggtaggtaaagctacgctgggtcgtatcatgaacgtcctgggcgaaccggtcgacatgaaaggcgagatcggcgaagaagagcgttgggcgattcaccgcgcagcgccttcctacgaagagttatcaaactctcaggaactgctggaaaccggtatcaaagttatcgacctgatgtgtccgttcgcgaagggcggtaaagtcggtctgttcggtggtgcgggtgtaggtaaaaccgtaaacatgatggagcttatccgtaacatcgcgatcgagcactccggttactctgtgtttgcgggcgtaggtgaacgtactcgtgagggtaacgacttctaccatgaaatgaccgactccaacgttatcgataaagtatccctggtgtatggccagatgaacgagccgccgggaaaccgtctgcgcgttgcactgaccggcctgaccatggcggagaaattccgtgacgaaggtcgtgacgtactgctgttcgtcgataacatctatcgttacaccctggccggtacggaagtatccgcactgctgggtcgtatgccttccgcggtaggttaccagccgactctggcggaagagatgggcgttctgcaggaacgtatcacctccaccaagaccggttctatca

SEQ ID NO: 351 - DNA, 823 bp, Salmonella choleraesuis subsp. choleraesuis ATCC 14028; identical to SEQ ID NO: 350

SEQ ID NO: 352 - DNA, 810 bp, Salmonella choleraesuis subsp. choleraesuis ATCC 51955
gccgtaccacgcgtgtacgatgcccttgaggtgcagaatggtaatgagaagctggtgctggaagttcagcagcagcttggcggcggtatcgtgcgtaccatcgcgatggggtcttctgacggtctgcgtcgcggtctggatgtaaaagatctcgaacacccgatcgaagtcccggtaggtaaagccacgctgggtcgtatcatgaacgtcctgggcgaaccggtcgacatgaaaggcgagatcggcgaagaagagcgttgggcgattcaccgcgcagcaccttcctacgaagagttgtcaaactctcaggaactgctggaaaccggtatcaaagttatcgacctgatgtgtccgttcgcgaagggcggtaaagtcggtctgttcggtggtgcgggtgtaggtaaaaccgtaaacatgatggagcttattcgtaacatcgcgatcgagcactccggttactctgtgtttgcgggcgtaggggaacgtactcgtgagggtaacgacttctaccacgaaatgaccgactccaacgttatcgataaagtctccctggtgtatggccagatgaacgagccgccgggaaaccgtctgcgcgttgcattgaccggtctgaccatggcggagaaattccgtgacgaaggtcgtgacgtactgctgttcgtcgataacatctatcgttacaccctggccggtacggaagtatccgcactgctgggccgtatgccttccgcagtaggttaccagccgactctggcggaagagatgggcgttctgcaggaacgtatcacctccaccaaaaccggttctatc

SEQ ID NO: 353 - DNA, 820 bp, Serratia ficaria ATCC 33105
gatgccgtaccaaaagtgtacgatgcccttgaggtagaaaacggtaccgagaaactggtgctggaagttcagcagcagctgggcggtggcgtcgttcgctgtatcgcaatggggacctctgacggtctgcgtcgcggtctgaaagtgaacaacctggaacacccgattgaagtgccggtgggtaaagctaccctgggccgtatcatgaacgtattgggcgaaccaatcgacatgaaaggcgagatcggcgaagaagagcgttgggcgattcaccgtcctgcgccaagctacgaagagctgtccaactcccaggacctgctggaaaccggtatcaaggtaatggacctgatttgtccgttcgccaagggcggtaaagtcggtctgttcggtggtgcgggcgtgggcaaaaccgtaaacatgatggagctgatccgtaacatcgcgatcgagcactccggttattccgtgtttgcgggcgtgggcgagcgtactcgtgagggtaacgacttctaccacgaaatgaacgactccaacgttctggacaaagtatccctggtttacggccagatgaacgagccgccgggtaaccgtctgcgcgttgcattgaccggcctgaccatggcggagaaattccgtgacgaaggccgcgacgttctgctgttcgttgacaacatttaccgttacaccctggccggtaccgaagtgtccgcacttctgggccgtatgccatccgcggtaggttatcagccaacgctggcggaagagatgggcgttctgcaagaacgtatcacctcgaccaagaccggttccatcacctccg

SEQ ID NO: 354 - DNA, 816 bp, Serratia fonticola ATCC 29844
gatgccgtaccgaaagtgtacaacgctcttgaggttgcaaacggcaccgagaaattggtgctggaagttcagcaacagctgggtggcggcgtggttcgctgtatcgcaatggggacctcagacggtctgcgtcgtggtctggccgtaaccgacctgcagcacccaattgaagtaccggtaggtaaagctaccctgggccgtatcatgaacgtattgggtgaaccaatcgacatgaagggcgacatcggcgaagaagaacgttgggctattcaccgccctgcgccaagctacgaagagctgtccagctcccaggatctgctggaaaccggtatcaaggtaatggacctgatctgcccgttcgccaagggtggtaaagttggtctgttcggtggtgctggtgtaggtaaaaccgtaaacatgatggagctgatccgtaacatcgcgatcgagcactccggttattctgtgtttgcgggcgtgggtgaacgtactcgtgagggtaacgacttctaccacgaaatgaccgattccaacgtactggacaaagtttccctggtttacggccagatgaacgagccaccaggtaaccgtctgcgcgttgcgctgaccggcctgaccatggctgagaagttccgtgacgaaggtcgtgacgtactgctgttcgtcgataacatctaccgttataccctggccggtaccgaagtgtccgcacttctgggccgtatgccatcggcggtaggttatcagccaacgctggcggaagagatgggtgttctgcaagaacgtatcacctctaccaagactggttcaatcacc

SEQ ID NO: 355 - DNA, 822 bp, Serratia grimesii ATCC 14460
gatgccgtaccaaaagtgtacaacgctcttgaggtagaaaacggtgccaataagctggtgctggaagttcagcaacagttgggcggtggcgtggttcgctgtatcgcaatggggacctctgatggtctgcgtcgcggtctgaaagtcacagacctggaccacccaattgaagtaccggtaggtaaagctactctgggccgtatcatgaacgtattgggtgaaccaatcgacatgaagggcgatatcggcgaagaagaacgttgggcgattcaccgtccggcgccaagctacgaagatttggccaactcccaggatctgctggaaaccggtatcaaggtaatggacctgatctgcccgttcgccaagggtggtaaagtcggtctgttcggtggtgcgggtgttggtaaaaccgtaaacatgatggagctgatccgtaacatcgcgatcgagcactccggttattctgtgtttgcgggcgtgggtgagcgtactcgtgagggtaacgacttctaccacgaaatgaacgactccaacgtactggacaaagtatccctggtttacggccagatgaacgagccaccgggtaaccgtctgcgcgttgctctgaccggtctgaccatggctgagaaattccgtgacgaaggccgtgacgttctgctgttcgttgataacatctaccgttataccctggccggtaccgaagtgtccgcacttctgggccgtatgccatcggcggtaggttatcagccaacgctggcggaagagatgggtgttctgcaagaacgtatcacctctaccaagactggttcaatcacctccgta

SEQ ID NO: 356 - DNA, 819 bp, Serratia liquefaciens ATCC 27592
atgccgtaccaaaagtgtacaatgctcttgaggtagaaaacggtaccgagaagctggtgctggaagttcagcagcagttgggcggtggcgtagttcgctgtatcgcgatggggacctcagatggtctgcgccgcggtctgaaagtgaacgatctggaacacccaattgaagtaccggtaggtaaagctaccctgggccgtatcatgaacgtattgggtgaaccaatcgacatgaaaggcgacatcggcgaagaagaacgttgggcgattcaccgtccagcgccaagctacgaagatttgtcaaactcccaggatctgctggaaaccggtatcaaggttatggacctgatttgtccgttcgctaagggcggtaaagttggtctgttcggtggtgctggtgttggtaaaaccgtaaacatgatggagctgatccgtaacatcgcgatcgagcactccggttattccgtgtttgcaggcgtgggtgagcgtactcgtgagggtaacgacttctaccacgaaatgaacgactccaacgtactggacaaagtatccctggtttacggccagatgaacgagccaccgggtaaccgtctgcgcgttgctctgaccggtctgaccatggcggagaaattccgtgacgaaggccgcgacgttctgctgttcgttgataacatttaccgttataccctggccggtaccgaagtgtccgcacttctgggccgtatgccatctgcggtaggttatcagccaacgctggcggaagagatgggcgttctgcaagaacgtatcacctctaccaagaccggttctatcacttccg

SEQ ID NO: 357 - DNA, 805 bp, Serratia marcescens ATCC 13880
tcaggatgccgtaccgaaagtgtacgacgcccttgaggtagaaaacggcaccgaaaaactggtgttggaagttcagcaacagctgggcggtggcgtggttcgctgtatcgcaatggggacctccgacggtctgcgtcgcggtctgaaagtgaacaacctggaccacccgattgaagtgccggtgggtaaagctaccctgggtcgtatcatgaacgtattgggtcaaccgatcgacatgaaaggcgacatcggcgaagaagagcgttgggcgattcaccgcgcggcgccaagctacgaagagctgtcaagctctcaggaactgctggaaaccggtatcaaggtaatggacctgatttgtccgttcgccaagggcggtaaagtcggtctgttcggcggtgcgggcgtaggtaaaaccgtaaacatgatggagctgatccgtaacatcgcgatcgagcactccggttattccgtgtttgcgggcgtgggcgagcgtactcgtgagggtaacgacttctaccacgaaatgaccgactccaacgttctggacaaagtatccctggtttacggccagatgaacgagccaccaggtaaccgtctgcgcgttgcgctgaccggtctgaccatggcggagaaattccgtgacgaaggccgtgacgttctgctgttcgttgacaacatctaccgttacaccctggccggtaccgaagtgtccgcacttctgggccgtatgccatccgcggtaggttatcagccaacgctggcggaagagatgggcgttctgcaagaacgtatcacctcgaccaag

SEQ ID NO: 358 - DNA, 822 bp, Serratia odorifera ATCC 33077
gatgccgtaccaaaagtgtacgatgcccttgaggtagaaaacggtaccgaaactctggtgctggaagttcagcagcagctgggcggtggcgtggttcgttgtatcgctatgggcacctccgacggtttgcgtcgcggcctgaaagtgaacgatctgcaacacccaatcgaagtcccggttggcaaggcaacgctgggtcgtatcatgaacgtattgggtcaaccaatcgacatgaaaggcgacatcggcgaagaagagcgttgggcgattcaccgcgcggcgccaagctacgaagaactgtccaactcccaggatctgctggaaaccggtatcaaggttatggacctgatctgcccgtttgccaagggtggtaaagtcggtctgttcggtggtgcgggtgttggtaaaaccgtaaacatgatggagctgatccgtaacatcgcgatcgagcactccggttattcagtgtttgcgggcgtgggtgagcgtactcgtgagggtaacgacttctaccacgaaatgaccgactccaacgtactggacaaggtttccctggtttacggccagatgaacgagccaccgggtaaccgtctgcgcgttgcgctgaccggtctgaccatggccgagaaattccgtgacgaaggtcgtgacgttctgctgttcgttgacaacatttaccgttacaccctggccggtaccgaagtgtctgcacttctgggccgtatgccatcggcggtaggttatcagccaacgctggcggaagagatgggcgttctgcaagaacgtatcacctcgaccaagaccggttctatcacctccgta

SEQ ID NO: 359 - DNA, 805 bp, Serratia plymuthica ATCC 183
gtgtacaacgctcttgaggtagaaaacggtgccaataagctggtgctggaagttcagcaacagctgggcggtggcgtggttcgctgtatcgcgatggggacctctgatggtctgcgtcgcggtctgaaagtgatcgacctggatcacccgattgaagtaccggtaggtaaagctaccctgggccgtatcatgaacgtattgggtgaaccaatcgacatgaaaggcgacatcggcgaagaagaacgttgggcaattcaccgtccagcgccaagctacgaagatttggccaactcccaggatctgctggaaaccggtatcaaggttatggacctgatctgtccgttcgctaagggcggtaaagtgggtctgttcggcggtgcgggcgtgggtaaaaccgtaaacatgatggagctgatccgtaacatcgcgatcgaacactccggttattccgtgtttgcgggcgtgggtgagcgtactcgtgagggtaacgacttctaccacgaaatgaacgactccaacgtactggacaaagtatccctggtttacggccagatgaacgagccaccgggtaaccgtctgcgcgttgctctgaccggtctgaccatggcggagaaattccgtgacgaaggccgcgacgttctgctgttcgttgataacatctaccgttataccctggccggtaccgaagtgtccgcacttctgggccgtatgccatctgcggtaggttatcagccaacgctggcggaagagatgggcgttctgcaagaacgtatcacctctaccaagaccggttctatcacctccg

SEQ ID NO: 360 - DNA, 831 bp, Serratia rubidaea ATCC 27593
ttccctcaggatgccgtaccaaaagtgtacgatgcccttgaggtagagaacggtaacgaaaaactggtgctggaagttcagcagcagctgggcggcggcgttgtacgctgtatcgccatgggtacttccgacggtctgcgtcgcggtctgaaagttaacgacctcgagcacccaatcgaagtgccagttggtaaagcaacgctgggtcgtatcatgaacgtattgggtcagccaatcgacatgaaaggcgacatcggcgaagaagagcgttgggcgattcaccgcgcggcgccaagctacgaagagctgtccagctcccaagagctgctggaaaccggtatcaaggtaatggacctgatctgcccgttcgccaagggtggtaaagttggtctgttcggtggtgcgggcgtaggtaaaaccgtaaacatgatggagctgatccgtaacatcgcgatcgagcactccggttactctgtgtttgcgggcgtgggtgagcgtactcgtgagggtaacgacttctaccacgaaatgaccgactccaacgtactggacaaagtatccctggtttacggccagatgaacgagccgccgggtaaccgtctgcgcgttgcactgaccggcctgaccatggcggaaaaattccgtgatgaaggccgcgacgttctgctgttcgtggataacatctaccgttacaccctggccggtaccgaagtgtccgcactgctcggccgtatgccatctgcggtaggttatcagccaacgctggcggaagagatgggcgttctgcaagaacgtatcacctcgaccaagaccggttcaatcacctccgta

SEQ ID NO: 361 - DNA, 831 bp, Pseudomonas putida strain LCDC7172
ttccctcaggatgccgtaccgcgcgtgtacgatgctcttgaggtgcaaaatggtaatgagcgtctggtgctggaagttcagcagcagctcggcggcggtatcgtgcgtaccatcgcaatgggttcctccgacggtctgcgtcgcggtctggatgtaaaagacctcgaacacccgatcgaagtcccggtaggtaaagcgactctgggccgtatcatgaacgtactgggtgaaccggtcgacatgaaaggcgagatcggtgaagaagagcgttgggcgattcaccgcgcagcaccttcctacgaagagctgtcaaactctcaggaactgctggaaaccggtatcaaagttatcgacctgatgtgtccgttcgctaagggcggtaaagttggtctgttcggtggtgcgggtgtaggtaaaaccgtaaacatgatggagctcattcgtaacatcgcgatcgagcactccggttactctgtgtttgcgggcgtaggtgaacgtactcgtgagggtaacgacttctaccacgaaatgaccgactccaacgttatcgacaaagtatccctggtgtatggccagatgaacgagccgccgggaaaccgtctgcgcgttgctctgaccggtctgaccatggctgagaaattccgtgacgaaggtcgtgacgttctgctgttcgttgacaacatctatcgttacaccctggccggtacggaagtatccgcactgctgggccgtatgccttcagcggtaggttatcagccgaccctggcggaagagatgggcgttctgcaggaacgtatcacctccaccaaaactggttctatcacctccgta

SEQ ID NO: 362 - DNA, 831 bp, Shigella boydii ATCC 9207; identical to SEQ ID NO: 361

SEQ ID NO: 363 - DNA, 802 bp, Shigella dysenteriae ATCC 11835
gccgtaccgcgcgtgtacgatgctcttgcggtgcaaaatggtaatgagcgtctggtgctggaagttcagcagcagctcggcggcggtatcgtgcgtaccatcgcaatgggttcctccgacggtctgcgtcgcggtctggatgtaaaagacctcgaacacccgatcgaagtcccggtaggtaaagcgactctgggccgtatcatgaacgtactgggtgaaccggtcgacatgaaaggcgagatcggtgaagaagagcgttgggctattcaccgcgcagcaccttcctacgaagagctgtcaaactctcaggaactgctggaaaccggtatcaaagttatcgacctgatgtgtccgttcgctaagggcggtaaagttggtctgttcggtggtgcgggtgtaggtaaaaccgtaaacatgatggagctcattcgtaacatcgcgatcgagcactccggttactctgtgtttgcgggcgtaggtgaacgtactcgtgagggtaacgacttctaccacgaaatgaccgactccaacgttatcgacaaagtatccctggtgtatggccagatgaacgagccgccgggaaaccgtctgcgcgttgctctgaccggtctgaccatggctgagaaattccgtgacgaaggtcgtgacgttctgctgttcgttgacaacatctatcgttacaccctggccggtacggaagtatccgcactgctgggccgtatgccttcagcggtaggttatcagccgaccctggcggaagagatgggcgttctgcaggaacgtatcacctccaccaaaaccg

SEQ ID NO: 364 - DNA, 819 bp, Shigella flexneri ATCC 12022
atgccgtaccgcgcgtgtacgatgctcttgaggtgcaaaatggtaatgagcgtctggtgctggaagttcagcagcagctcggcggcggtatcgtgcgtaccatcgcaatgggttcctccgacggtctgcgtcgcggtctggatgtaaaagacctcgaacacccgatcgaagtcccggtaggtaaagcgactctgggccgtatcatgaacgtactgggtgaaccggtcgacatgaaaggcgagatcggtgaagaagagcgttgggcgattcaccgcgcagcaccttcctacgaagagctgtcaaactctcaggaactgctggaaaccggtatcaaagttatcgacctgatgtgtccgttcgctaagggcggtaaagttggtctgttcggtggtgcgggtgtaggtaaaaccgtaaacatgatggagctcattcgtaacatcgcgatcgagcactccggttactctgtgtttgcgggcgtaggtgaacgtactcgtgagggtaacgacttctaccacgaaatgaccgactccaacgttatcgacaaagtatccctggtgtatggccagatgaacgagccgccgggaaaccgtctgcgcgttgctctgaccggtctgaccatggctgagaaattccgtgacgaaggtcgtgacgttctgctgttcgttgacaacatctatcgttacaccctggccggtacggaagtatccgcactgctgggccgtatgccttcagcggtaggttatcagccgaccctggcggaagagatgggcgttctgcaggaacgtatcacctccaccaaaactggttctatcacctccg

SEQ ID NO: 365 - DNA, 802 bp, Shigella sonnei ATCC 29930
gtaccgcgcgtgtacgatgctcttgaggtgcaaaatggtaatgagcgtctggtgctggaagttcagcagcagctcggcggcggtatcgtgcgtaccatcgcaatgggttcctccgacggtctgcgtcgcggtctggatgtaaaagacctcgaacacccgatcgaagtcccggtaggtaaagcgactctgggccgtatcatgaacgtactgggtgaaccggtcgacatgaaaggcgagatcggtgaagaagagcgttgggcgattcaccgcgcagcaccttcctacgaagagctgtcaaactctcaggaactgctggaaaccggtatcaaagttatcgacctgatgtgtccgttcgctaagggcggtaaagttggtctgttcggtggtgcgggtgtaggtaaaaccgtaaacatgatggagctcattcgtaacatcgcgatcgagcactccggttactctgtgtttgcgggcgtaggtgaacgtactcgtgagggtaacgacttctaccacgaaatgaccgactccaacgttatcgacaaagtatccctggtgtatggccagatgaacgagccgccgggaaaccgtctgcgcgttgctctgaccggtctgaccatggctgagaaattccgtgacgaaggtcgtgacgttctgctgttcgttgacaacatctatcgttacaccctggccggtacggaagtatccgcactgctgggccgtatgccttcagcggtaggttatcagccgaccctggcggaagagatgggcgttctgcaggaacgtatcacctccaccaaaactggtt

SEQ ID NO: 366 - DNA, 785 bp, Staphylococcus aureus
taacgccttggttattgatgtgcctaaagaagaaggtacaatacaactaacattagaagttgcgctgcaattaggtgacgacgttgttcgtacaattgcgatggattcaactgatggtgtccaaagaggcatggatgtaaaagatacaggcaaagaaattagtgtacctgttggtgatgaaacattaggtcgtgtatttaatgtactaggtgaaacaattgaccttaaagaagaaattagtgattctgttcgccgcgatcctatccatcgtcaagcaccagcattcgatgaactttcaacagaagttcaaattttagaaacaggtattaaagtagtagatttactagcaccttatattaaaggtggtaaaatcggattgttcggtggtgccggtgtaggtaaaacagtattaatccaagaattaattaacaacatcgctcaagagcacggtggtatttctgtattcgccggtgtaggtgaacgtactcgtgaaggtaacgatttatacttcgaaatgagtgatagtggtgtaattaagaaaacagccatggtattcgggcaaatgaatgagccacctggtgcacgtatgcgtgttgcattatctggtttaacaatggctgaatatttccgtgacgaacaaggtcaagacgtattattattcatcgataacattttcagatttacacaagctggttctgaggtatctgcattattaggtcgtatgccttctgcagtaggttaccaaccaacacttgctactgaaatgggacaattacaagaacgta

SEQ ID NO: 367 - DNA, 843 bp, Staphylococcus auricularis ATCC 33753
gaacataacgaagtgcctaatattaataacgccttagtactcgatgttgaaagagaagacggaacagtgtctttaactttagaagtagctttacaattaggcgatgacgttgttcgtaccattgcaatggattcaactgatggtgttaaacgtggtaacgaagtcaaagatactggtaatagcattagcgtaccagtcggagacgaaactttaggacgtgtcttcaacgttctaggtgaaacaattgatttagaagataaacttgatgattctgcgcgacgtgaccctatacatagagaagcgccagcgtttgatcaattatcaactcaagttgaaattttagaaacaggaattaaagttgttgacttattagcaccttatattaaaggtggtaaagttggactcttcggtggtgccggtgttggtaaaaccgttttaatccaagaattaatcaacaacatcgctcaagaacacggtggtatttcagtctttgccggtgtaggtgaacgtacacgtgaaggtaacgacttgtactatgaaatgagcgacagtggtgtaatcaagaaaacagccatggtcttcggacaaatgaacgaaccacctggcgcacgtatgcgtgttgctttatctggtttaacaatggctgaatatttccgtgatgaacaaggacaagacgtattgttattcatcgacaatattttccgtttcacacaagccggttcagaagtttctgccttactaggtcgtttaccatcagccgttggttatcaacctacattagcaacagaaatgggacaattacaagaacgtattacttcaacaacaaaaggatcagttacttca

SEQ ID NO: 368 - DNA, 849 bp, Staphylococcus capitis subsp. capitis ATCC 27840
gctttgaacataatgaagttcctgatattaacaatgccttacacatcgaagttcctaaagaagatagcacacttcatttaactttagaagttgcacttcaattaggtgacgatgtagtacgtacaatcgcaatggactcaactgacggcgttcaaagaggtatggaagttaaagatacaggtaaagatattagcgtacctgttggtgatgcaactttaggaagagtatttaacgtattaggagaaacaatcgatttagatgaaaagattgatgattcagtacgtcgtgatcctattcatagacaggcacctggcttcgatgaattatctactaaagtagaaatcttagaaacaggtatcaaagtagtagacttattagcaccttacattaaaggtggtaaaattggattattcggtggtgccggtgttggtaagacagttttaatccaagaacttatcaataatatcgctcaagagcatggtggtatttcagtattcgccggtgttggtgaacgtacacgtgaaggtaacgacctttactatgaaatgagcgatagtggtgtaattaagaaaacagcgatggtattcggtcagatgaacgagccacctggtgctcgtatgcgtgttgcattatcaggtttaacaatggcagaatatttccgtgatgaagaaggccaagacgtattattattcattgataatatcttcagattcacacaagctggttctgaagtttcagcattacttggacgtatgccttcagccgttggttatcaaccaacacttgctactgaaatgggtcaattacaagaacgtattagttcaactaataaaggttctgttacttcaa

SEQ ID NO: 369 - DNA, 830 bp, Staphylococcus cohnii DSM 20260
gaagttccagaaattaataatgccttagttctcgatatagaaagagaagaaggtactgttgaattaacgttagaagttgcattacaacttggtgatgacgtagtacgaacaatcgcaatggattcaactgatggtgttaaacgtggtacagaagttagagatagcggaaatagtatcagcgtaccagttggtaatgaaacattaggtagagtatttaatgtattaggtgatacgatagatttagatgaagacatagatgactcagtgcgtcgtgacccaattcatagagaagcacctgcatttgatcagttatctactaaagttgaaattttagaaacaggtatcaaagtcattgatttattagcaccatatatcaaaggtggtaaagttggattattcggtggtgccggtgttggtaaaactgtattaattcaagaattaatcaataatatcgctcaagagcatggtggtatatccgtatttgctggtgtaggtgagcgtacgcgtgaaggtaatgacctatactttgaaatgagtgatagtggtgttattaaaaagacagctatggtatttggacaaatgaacgaaccacctggtgcgcgtatgcgagtagcactttctggtttaacaatggctgaatatttccgggatgaacaaggacaagatgttctattattcatagataacatctttagatttactcaagctggttcagaagtttctgcgttattaggtcgtatgccttcagctgttggttaccaaccaacgttagcaactgaaatgggacaattacaagaacgtattacttctacaactaaaggttcagtaac

SEQ ID NO: 370 - DNA, 787 bp, Staphylococcus epidermidis ATCC 14990
aataatgcattacacatcgaagttcctaaagaagatggagcgcttcaattaacattagaagttgcacttcaactaggtgacgatgtagttcgtacaattgcaatggactcaactgacggcgttcaaagaggaatggaagttaaagatacaggtagagacataagtgtacctgtcggtgacgtaactctaggaagagtgtttaacgtactaggagaaactattgacttagatgaaaaaattgatgattcagtacgacgtgaccctatccatagacaagctccaggattcgacgaattatcaacaaaagtagaaatcttagaaactggtattaaagtagtagacttattagcaccttacataaaaggtggtaaaattggattatttggtggtgccggtgtaggtaaaaccgtactaatccaagaacttattaataacatcgctcaagaacacggtggtatctcagtattcgctggtgttggtgaacgtacacgtgaaggtaatgatctttactatgaaatgagtgacagtggtgttatcaagaaaactgcaatggtctttggtcaaatgaatgagccacctggtgcacgtatgcgtgtagcattatccggattaacaatggccgaatatttccgagatgaagaaggccaagatgtgttattattcattgataacattttcagattcactcaagctggttcagaagtttctgcgttattaggtcgtatgccatcagctgttggttatcaacctacacttgctacagaaatgggtcaattacaagaacgta

SEQ ID NO: 371 - DNA, 830 bp, Staphylococcus haemolyticus ATCC 29970
gaagtacctgaaattaataacgccttaatcatcgaagttcccaaagaagatggtacttttgaattaacgcttgaagttgcattacaactaggtgatgacgttgttcgtacaattgctatggattcaacagatggtgttcaacgtggtatggaagttcagaacactggaaaagacatttcagtaccagttggcgaagtaactttaggacgtgtatttaacgtattaggtgacacaattgatttagaagataaattagatggttcagtaagacgtgatccaattcatagacaatcacctaactttgacgaattatctactgaagtagaaattcttgaaactggaatcaaagttgtagacttattagcaccatacatcaaaggtggtaaaatcggtctatttggtggtgccggtgttggtaaaaccgttttaatccaagaattgattaataatatcgcacaagaacatggtggtatctcagtatttgctggtgtaggtgaacgtacacgtgaaggtaacgacctatattatgaaatgagagatagtggtgttattaagaaaacagcaatggtatttggtcaaatgaacgagccacctggtgcacgtatgcgtgtggcactttctgcattgacaatggctgagtatttccgtgatgaacaaggacaagacgttctgttattcatcgataacattttcagatttactcaagcaggttcagaagtatcagcattattgggacgtatgccttcagctgtaggttatcaacctactttagctacagaaatgggtcaattacaagaacgtattacatcaacgaataaaggttcagtaac

SEQ ID NO: 372 - DNA, 846 bp, Staphylococcus hominis subsp. hominis ATCC 27844
tcgaacataatgaagtccctgaaattaataatgccctaattattgaagtacccaaaaatgatggcacatttaaattaacattagaagttgcattgcaactaggtgatgatgttgttcgtactattgcaatggattcaactgatggtgttcaacgtggtatgcaagttgtgaatactggtaaagatattagtgttcctgtaggtgaagaaacacttggacgtgtgtttaacgttttaggagaaacaatagatttaaacgaaaaaatagatagttctgttagacgtgatccaattcatcgtcgtcaacctaattttgatgaattatctactgaagtagaaattcttgaaacaggtattaaagttgtagacttattagcaccttatattaaaggtggtaagattggtttattcggtggtgccggcgtaggtaaaactgtattaattcaagaattaatcaataatatcgctcaagaacatggtggtatttctgtattcgctggtgtaggtgaacgtactcgtgaaggtaacgatttatactatgaaatgagcgatagtggcgttatcaataaaacagccatggtatttgggcaaatgaatgagccgccaggtgcgcgtatgcgtgttgctttatcagcattgacaatggctgaatatttccgtgatgaacaaggtcaagatgtacttttattcattgacaatattttccgctttactcaagctggttctgaagtttcagcattattaggacgtatgccttcagctgtaggttatcaacctacattagcaactgaaatgggtcaattacaagaacgtattacatctactaataaaggttcagtcacttcaa

SEQ ID NO: 373 - DNA, 846 bp, Staphylococcus hominis strain CSG 175
tcgaacataatgaagtccctgaaattaataatgccctaattattgaagtacccaaaaatgatggcacattcaaattaacattagaagttgcattgcaactaggtgatgatgttgttcgtactattgcaatggattcaactgatggtgttcaacgtggtatgcaagttgtgaatactggtaaagatattagtgttcctgtaggtgaagaaacacttggacgtgtgtttaacgttttaggagaaacaatagatttaaacgaaaaaatagatagttctgttagacgtgatccaattcatcgtcgtcaacctaattttgatgaattatctactgaagtagaaattcttgaaacaggtattaaagttgtagacttattagcaccttatattaaaggtggtaagattggtttattcggtggtgccggcgtaggtaaaactgtattaattcaagaattaatcaataatatcgctcaagaacatggtggtatttctgtattcgctggtgtaggtgaacgtactcgtgaaggtaacgatttatactatgaaatgagcgatagtggcgttatcaataaaacagccatggtatttgggcaaatgaatgagccgccaggtgcgcgtatgcgtgttgctttatcagcattgacaatggctgaatatttccgtgatgaacaaggtcaagatgtacttttattcattgacaatattttccgctttactcaagctggttctgaagtttcagcattattaggacgtatgccttcagctgtaggttatcaacctacattagcaactgaaatgggtcaattacaagaacgtattacatctactaataaaggttcagtcacttcaa

SEQ ID NO: 374 - DNA, 835 bp, Staphylococcus lugdunensis ATCC 43809
ataatgaagtgcctgaaataaataatgcgctcattgttgaaattcctaaaagtgatacaacaatcagtttaacacttgaagttgctttgcaattaggtgacgatgttgtacgtactattgcaatggattcaactgatggcgttcaacgtggtatggaagttcaaaacacaggtaaagacatcagtgtacctgttggagatgaaacattaggaagagtatttaacgttttaggagaatctattgatttagaagaaaagctagatgactctgtgcgtagagatccaattcatagactagcacctaaatttgatgaattatctacagaagtagaaattcttgaaactggtattaaagttgttgatttattagcaccatatattaaaggtggtaaagttggattgtttggtggtgccggagtaggtaaaacggtattaattcaagaattaatcaacaatattgctcaagaacatggtggtatttctgtgtttgccggagtaggtgaacgtacacgtgaaggtaatgacttatattatgaaatgagcgatagtggcgtaattaagaaaacagcgatggtatttggccaaatgaatgaaccacctggtgcacgtatgagagttgcgttatctgccttaacaatggctgaatatttccgtgacgagcaaggacaagacgtattgctgtttatcgataatatattccgttttacacaagcaggttcagaagtatctgcattacttggacgtatgccatctgccgttggttatcaaccaacattggctacagaaatgggacaattgcaagaaagaattacatctacaaataaaggttctgtaac

SEQ ID NO: 375 - DNA, 842 bp, Staphylococcus saprophyticus ATCC 15305
gagcacaatgaagttccagaaattaacaatgccttagtcgtagacgttgaaagagatgaaggtacagtatctcttacattagaagtggcattacaacttggcgatgatgtcgtacgtacaattgcaatggattctactgatggtgttaaacgtggtacagaagttcgagatagcggagatagcatcagtgttccagttggtgatgctacgttaggacgtgtgtttaatgttcttggtgatacaattgacttagacgagaagcttgatacttctgtcaaacgtgatccaattcatagagaagcacctgcattcgatcaattatcaacaaaagttgaaatcttagaaacaggtattaaagtaattgatttacttgcaccatatattaaaggtggtaaaatcggtttattcggtggcgctggtgtaggtaaaacagtattaattcaagaattaattaataatatagctcaagaacatggtggtatttcagtatttgccggcgtaggtgaacgtacgcgtgaaggtaatgacttatactacgaaatgagtgatagtggtgttattaagaaaacagctatggtcttcggacaaatgaatgagccacctggtgcgcgtatgcgtgttgctttatcaggcttaacaatggctgaacacttccgtgatgtacaaggacaagatgttttactatttattgataacatattcagatttacgcaagctggttcagaagtatcagcactattaggtcgtatgccatcagccgttggttatcaacctacccttgctactgaaatgggtcaattacaagaacgtattacatcaacaactaaaggatctgtaacgtc

SEQ ID NO: 376 - DNA, 842 bp, Staphylococcus simulans ATCC 27848
tgatgaactgcctaagattaataacgcattagtgctagatgtacctaagaaagatggcacgactgaatctcttacattagaagtagcacttgaattaggcgacgacgtagttagaactatcgccatggactctacagacggaattaaacgtggtgacgacgttaaagacactggtcgtccaatcagtgtacctgtcggtgaagatacgttaggaagagtatttaacgttttaggtgatccaatcgataatgatggaccgatttctgaatcagttccacgtgaaccaattcatagacaaccacctaaatttgatgaattatcaacaaaagttgaactacttgaaactggtatcaaagtagtagacttattagcaccatatatcaaaggtggtaaagttggtttattcggtggtgccggagtaggtaaaactgtattaatccaagaattaattaataacatcgctcaagaacacggcggtatttcagtattcgcaggtgttggtgaacgtacacgtgaaggtaacgacttgtacttcgaaatgagcgacagtggtgttatcaagaaaacagcgatggtattcggacaaatgaacgaaccacctggtgcacgtatgcgtgtagctttatcaggtttaacaatggctgaatacttccgtgatgttaaaggacaagacgttcttttattcatcgataacattttccgcttcacacaagcaggttctgaggtatcagcattgcttggccgtatgccatcagccgttggttaccaaccaacattggcaacagaaatgggtcaattacaagaacgtatcacttctacaatgaaaggttctatcacatcta

SEQ ID NO: 377 - DNA, 841 bp, Staphylococcus warneri ATCC 27836
cataacgaagtccctgatattaataatgcccttattattgaagttccaaaagaagatggaacgttaaacttaacattagaagttgcactacaattaggtgatgatgttgtacgtacaattgcaatggattcaactgatggtgttcaaagaggcatggatgttaaagacacaggtaaagatattagtgtacctgtaggcgatgaaacgcttggaagagtgtttaatgtactaggtgaaacaattgacttggaagagaaaattgatgattccgtacgtcgtgatccaatccatagacaatcaccaggtttcgatgaattatctactgaagtagaaatcttagaaacaggtattaaagtagtagacttattagcaccttacattaaaggtggtaaagttggactattcggtggtgccggagtaggtaaaaccgttttaatccaagaattaattaacaatattgcacaagaacatggtggtatttcagtattcgcgggtgtaggtgaacgtactcgtgaaggtaatgatttatactatgaaatgagtgatagtggtgtaattaagaaaacagcgatggtatttggacaaatgaatgaaccacctggcgcacgtatgcgtgtagctttatctggtttaactatggctgaatacttccgtgatgaacaaggacaagacgtacttttattcatcgataatattttcagatttacacaagctggttctgaagtttctgcattacttggtcgtatgccttcagccgttggttaccaaccaacattagcaactgaaatgggtcaattacaagaacgaattacatctacaaataaaggttctgtaacatcta

SEQ ID NO: 378 - DNA, 846 bp, Streptococcus acidominimus ATCC 51726
tttaacacgaatgaaccgcttcctgagataaataatgcacttgttgtttacaaagacagtgagaaaaaacataaaatcgttcttgaagtagctcttgaacttggtgaaggcctcgttcgtaccattgctatggaatcaactgatggtttgacacgtggtctagaagttcttgatacaggccgtgcaatcagtgtaccagttggtaaagaaacgcttggacgtgtcttcaacgttcttggtgatgctatcgatcttgaagaaccatttggagaagatgcagaacgtcaccccattcataagagtgccccaacttttgatgaattatcaacgtcaacagaaatccttgaaacagggattaaagttatcgacctacttgccccttacttaaaaggagggaaggttggacttttcggtggtgccggagttggtaagaccgttcttatccaagagttgattcataacattgctcaagagcatggtggtatttcagtatttaccggagttggtgaacgtacacgtgaaggtaatgacctctattgggaaatgaaagaatcaggcgttattgaaaaaacagctatggtatttggtcagatgaatgagccacctggtgcacgtatgcgtgtagcccttactggtttgacaatcgctgaatatttccgtgatgttgaaggacaggacgtgcttctctttattgataacatttttcgtttcacacaagcaggttctgaagtttcagctcttcttggacgtatgccatcagccgttggttatcaaccaaccttggcaactgaaatgggtcaattgcaagaacgtatcacgtcaactaaaaaaggttctgttacatca

SEQ ID NO: 379 - DNA, 846 bp, Streptococcus agalactiae ATCC 12403
ttgcaagtggcgacaaacttcctgagattaataatgcattgattgtctataaaaatggcgataagtcacaaaaagtagtacttgaagttactcttgaacttggtgacggcctcgttcgtacaatcgctatggaatcaactgatgggcttacacgtggtttggaagtattagatactggtcgcgcaattagtgtgccggttggtaaggatactttgggtcgtgtcttcaacgttcttggagatgctattgaccttgaagagccttttgcagaagatgcagaacgtcaaccaatccataaaaaagcaccatcgtttgatgaattatcaacatcatcagaaatcttagaaacaggtattaaagttattgacttattagcaccttacttaaaaggtggtaaagttggacttttcggtggtgcaggtgttggtaaaaccgttcttattcaagaattaatccacaacatcgcccaagaacatggtggtatttcagtatttactggtgtaggagaacgtactcgtgaagggaatgacctttattgggaaatgaaagaatctggcgttattgaaaaaacggctatggtctttggtcaaatgaatgaaccaccaggagcacgtatgcgtgtggcacttactggtcttacaatagctgagtacttccgtgatgtagaaggacaagatgtgcttctcttcattgataatatcttccgtttcacacaagctgggtcagaagtgtcagcgcttttaggtcgtatgccttcagccgttggttatcaaccaacacttgctacagaaatgggacaattacaagagcgtatcacttcaactaaaaaaggttctgttacctcaa

SEQ ID NO: 380 - DNA, 846 bp, Streptococcus agalactiae ATCC 13813
ttgcaagtggcgacaaacttcctgagattaataatgcattgattgtctataaaaatggcgataagtcacaaaaagtagtacttgaagttgctcttgaacttggtgacggcctcgttcgtacaatcgctatggaatcaactgatgggcttacacgtggtttggaagtattagatactggtcgcgcaattagtgtgccggttggtaaggatactttgggtcgtgtcttcaacgttcttggagatgctattgatcttgaagagccttttgcagaagatgcagaacgtcaaccaatccataaaaaagcaccatcgtttgatgaattatcaacatcatcagaaatcttagaaactggtattaaagttattgacttattagcaccttacttaaaaggtggtaaagttggacttttcggtggtgcgggtgttggtaaaaccgttcttattcaagaattaatccacaacatcgcccaagaacatggtggtatttcagtatttactggtgtaggagaacgtactcgtgaagggaatgacctttattgggaaatgaaagaatctggcgttattgaaaaaacggctatggtctttggtcaaatgaatgaaccaccaggagcacgtatgcgtgtggcacttactggtcttacaatagctgagtacttccgtgatgtagaaggacaagatgtgcttctcttcattgataatatcttccgtttcacacaagctgggtcagaagtgtcagcgcttttaggtcgtatgccttcagccgttggttatcaaccaacacttgctacagaaatgggacaattacaagagcgtatcacttcaactaaaaaaggttctgttacctcaa

SEQ ID NO: 381 - DNA, 845 bp, Streptococcus agalactiae ATCC 12973
ttgcaagtggcgacaaacttcctgagattaataatgcattgattgtctataaaaatggcgataagtcacaaaaagtagtacttgaagttgctcttgaacttggtgacggcctcgttcgtacaatcgctatggaatcaactgatgggcttacacgtggtttggaagtattagatactggtcgtgcaattagtgtgccggttggtaaggatactttgggtcgtgtcttcaacgttcttggagatgctattgaccttgaagagccttttgcagaagatgcagaacgtcaaccaatccataaaaaagcaccatcatttgatgaattatcaacatcatcagaaatcttagaaacaggtattaaagttattgacttattagcaccttacttaaaaggtggtaaagttggacttttcggtggtgcgggtgttggtaaaaccgttcttattcaagaattaatccacaacatcgcccaagaacatggtggtatttcagtatttactggtgtaggagaacgtactcgtgaagggaatgacctttattgggaaatgaaagaatctggcgttattgaaaaaacggctatggtctttggtcaaatgaatgaaccaccaggagcacgtatgcgtgtggcacttactggtcttacaatagctgagtacttccgtgatgtagaaggacaagatgtgcttctcttcattgataatatcttccgtttcacacaagctgggtcagaagtgtcagcgcttttaggtcgtatgccttcagccgttggttatcaaccaacacttgctacagaaatgggacaattacaagagcgtatcacttcaactaaaaaaggttctgttacctca

SEQ ID NO: 382 - DNA, 845 bp, Streptococcus agalactiae ATCC 27591
ttgcaagtggcgacaaacttcctgagattaataatgcattgattgtctataaaaatggcgataagtcacaaaaagtagtacttgaagttgctcttgaacttggtgacggcctcgttcgtacaatcgctatggaatcaactgatgggcttacacgtggtttggaagtattagatactggtcgcgcaattagtgtgccggttggtaaggatactttgggtcgtgtcttcaacgttcttggagatgctattgaccttgaagagccttttgcagaagatgcagaacgtcaaccaatccataaaaaagcaccatcgtttgatgaattatcaacatcatcagaaatcttagaaactggtattaaagttattgacttattagcaccttacttaaaaggtggtaaagttggacttttcggtggtgcaggtgttggtaaaaccgttcttattcaagaattaatccacaacatcgcccaagaacatggtggtatttcagtatttactggtgtaggagaacgtactcgtgaagggaatgacctttattgggaaatgaaagaatctggcgttattgaaaaaacggctatggtctttggtcaaatgaatgaaccaccaggagcacgtatgcgtgtggcacttactggtcttacaatagctgagtacttccgtgatgtagaaggacaagatgtgcttctcttcattgataatatcttccgtttcacacaagctgggtcagaagtgtcagcgcttttaggtcgtatgccttcagccgttggttatcaaccaacacttgctacagaaatgggacaattacaagagcgtatcacttcaactaaaaaaggttctgttacatca

SEQ ID NO: 383 - DNA, 845 bp, Streptococcus agalactiae strain CDCss-1073; identical to SEQ ID NO: 382

SEQ ID NO: 384 - DNA, 845 bp, Streptococcus dysgalactiae ATCC 43078
ttgctagtggggacaaacttccagagattaataatgcattgattgtttataaagatagtgataaaaagcaaaaaatcgtccttgaagttgctctggaacttggtgacggtatggtgcgaacaatcgctatggaatcaactgatgggcttacacgtgggttagaagttcttgacactggtcgtgcgattagtgtaccagtaggtaaagaaactttgggacgcgtctttaatgtacttggagaaaccattgacttggaagaaccatttgcagaagacgttgaccgtcagccaatccataaaaaagcaccatcgtttgatgaattatcaacatcatcagaaattcttgaaactggtatcaaggtaattgaccttcttgccccttaccttaaaggtggtaaagttggacttttcgggggtgccggagttggtaagactgtccttatccaagaattaatccacaatatcgcccaagaacacggaggtatttcagtatttaccggtgttggtgagcgaacacgtgaaggaaatgacctttactgggaaatgaaagaatcaggcgttattgagaaaactgccatggtttttggtcagatgaatgagccgcctggggcacgtatgcgtgtagcccttactggtttaaccattgctgagtatttccgtgatgtagaaggccaagatgttttgctctttattgataatatcttccgtttcactcaggcaggttcagaagtatcagccctcttaggccgtatgccttctgctgttggttaccaaccgacccttgctactgaaatgggacaattgcaagaacgtattacgtcaactcaaaaaggatctgttacttct

SEQ ID NO: 385 - DNA, 846 bp, Streptococcus equi subsp. equi ATCC 9528
ttgcgagtggggacaaactaccagagattaataatgcgttgatagtttataaagatggcgataaaaagcaaaaaatcgttctcgaggttgccctagagcttggagacggtatggtacgtacaattgctatggaatcaaccgatgggcttacacgtggattagaggttcttgatactggtcgtgccattagtgtaccagttggtaaagagactctaggtcgtgttttcaacgttcttggtgaaaccatcgacctagaagcaccatttgcagatgatgttaatcgtgaaccgatccataaaaaagcaccagcctttgatgaattgtcaacatcatcagaaattcttgaaacaggtatcaaggttattgacctgcttgccccttacttaaagggtggtaaggtcggtcttttcggtggtgccggagttggtaaaaccgttcttatccaagaattaatccacaatatcgctcaagagcatggtgggatctcggtatttaccggtgttggtgagcgtacgcgtgaaggaaatgacctttactgggaaatgaaggaatcaggcgttattgaaaaaacagccatggtttttggtcagatgaatgaaccaccaggagcccgtatgcgtgttgccttgaccggcttgacaattgctgaatatttccgcgatgttgaaggccaagacgtcctgctcttcattgacaatattttccgctttactcaagcaggctcagaggtatcagcccttctaggtcgtatgccttcagccgttggttaccagccaacacttgccactgaaatgggacaattgcaagagcgtatcacctcaacgaaaaaaggctctgttacctcta

SEQ ID NO: 386 - DNA, 843 bp, Streptococcus anginosus ATCC 27335
gcagctggtgataaacttcctgagattaacaatgcattggtcgtttatactgatgaacaaaagtctaaacgtatcgtgctcgaagtagctcttgaacttggagaaggtgtggttcgtaccattgccatggaatctactgatggattgactcgtggactagaagttctggacactggtcgtccaatcagcgttcctgttggtaaagatacccttggacgtgtctttaacgttcttggtgataccattgacttggaagcaccttttgcagacgatgcagagcgtgaaccaattcacaaaaaagcaccaactttcgatgaattgtcaacatctactgaaatccttgaaacagggattaaagttatcgacttgctagccccttaccttaagggtggtaaagtcggactcttcggtggtgccggtgttggtaaaaccgttcttattcaagagttgattcacaacattgcccaagagcacggtggtatttccgtgtttacaggtgttggtgaacgtacacgtgaaggtaatgacctttactgggaaatgaaagaatctggcgttatcgagaaaacagccatggtcttcggtcaaatgaacgaaccacctggagcacgtatgcgtgttgcccttactggtttgacaattgcggaatacttccgtgatgtcgagggtcaagacgttcttctcttcatcgataacatcttccgtttcactcaagcaggttctgaggtttctgcccttcttggtcgtatgccatcagccgttggttaccaacctacacttgctactgaaatgggtcaattgcaagaacgtatcacatcaactaaaaaaggttctgttacatct

SEQ ID NO: 387 - DNA, 843 bp, Streptococcus salivarius ATCC 7073; identical to SEQ ID NO: 386

SEQ ID NO: 388 - DNA, 841 bp, Streptococcus suis ATCC 43765
ttgcagcagaagataaacttcctgagattaacaacgcactcgttgtatataaaaatgatgattccaaacaaaaagtcgtgcttgaagtggctttggaacttggtgatggcgttgtacggaccattgccatggaatcaacggatggattgacacgtgggatggaagttctcgatacaggtcgtcccatctctgttccagtcggtaaagaaacgctgggtcgtgtcttcaatgtgttgggagataccattgaccttgaagagtcttttccggcagattttgaacgtgagcctatccataagaaagcgccggcttttgacgaattatctacttcaagcgaaattttggaaacagggattaaggttatcgacctcctagcaccttatctaaaaggtggtaaggttggtctcttcggtggtgctggtgttggtaaaaccgttcttatccaagaattgattcacaatattgcccaagaacacggtggtatctctgtatttaccggagttggcgagcgtacccgtgaagggaacgatctttactgggaaatgaaagaatcaggtgttattgaaaaaacggccatggtatttggtcagatgaatgagccaccaggagcccgtatgcgtgttgctcttactggtttgactattgcggaatacttccgtgatgtggaagggcaggatgttcttctgttcatcgataatatcttccgtttcacacaggctggttcagaagtgtctgccctcttgggtcgtatgccatcagccgttggttatcagccaacacttgcgacggagatgggacaattgcaggagcgtattacctcaaccaagaagggttctgttac

SEQ ID NO: 389 - DNA, 844 bp, Streptococcus uberis ATCC 19436
gcaaacggtgaaaaattaccagagattaataatgcattgatagtttataaaggtagcgataaaaaacaaaagattgttcttgaagttgctttggaacttggggacggaatggttcgtacaatcgctatggaatcaactgatgggcttacacgtggattagaagttttagatactggccgtgccattagtgtaccagtcggaaaagaaactttgggtcgtgttttcaatgtgcttggtgaaaccattgatttggatgaaccatttgccgctgatgctgcaagagaacccatccataaaaaagccccagcatttgatgaactatcaacgtcttcagaaattcttgaaaccggaataaaagttattgacttattagccccttatctcaaaggtggtaaagttggtttatttggtggtgccggagtaggtaaaacggttttaattcaagaattaattcataatattgcacaagaacatggtggtatttcagtatttaccggtgttggtgaaagaactcgtgaaggtaatgacctttattgggaaatgaaagaatctggcgttattgaaaaaacagccatggtatttggacaaatgaacgaaccaccaggagcacgtatgcgcgttgctttaacaggtttaaccattgctgaatatttccgggatgttgaaggtcaagatgttttgctctttattgacaacattttccgtttcacgcaagctggttcagaagtttcagccctattgggtcgtatgccttcagcggtaggataccaaccaacacttgctaccgaaatgggacaattgcaagaaagaattacctcaactaacaagggatctgttacttcta

SEQ ID NO: 390 - DNA, 846 bp, Tatumella ptyseos ATCC 33301
ttccctcaggacgctgtaccacaggtgtacaacgctcttgaggttgaaaatggtgatacccgtctggtgctggaagttcagcagcagctgggcggtggtgtcgttcgtacgattgcaatgggaacctctgacggcctgaaacgtggccttaaggtgaccgatctgcaaaaaccgattcaggtaccggtcggtaaagcgacgctgggccgtatcatgaacgtactgggtcagccaatcgatatgaaaggcgacctgaagaacgaagatggtagcaatgttgaggtgaactctattcaccgtgcagcgccaagctacgaagaactggctaactctactgagctgctggaaacgggtatcaaggttatcgacctgatctgtccgtttgcaaaaggcggtaaagtgggtctgttcggtggtgcgggtgtaggtaagaccgtcaacatgatggaactgatccgtaacatcgctatcgagcactctggttactctgtatttgcaggggtgggtgagcgtacccgtgaaggtaacgacttctaccacgaaatgaccgagtctaacgttctggataaagttgctctggtttatggccagatgaacgagccaccaggaaaccgtctgcgcgttgcgctgaccggtctgactatggctgaaaaattccgtgacgaaggccgtgacgtactgctgttcgttgataacatctatcgttataccctggccggtactgaagtttcagcactgctgggtcgtatgccttctgcggtaggttatcagccaacactggccgaagaaatgggtgttcttcaggaacgtatcacgtcaaccaaaaccggttcaatcacttccgta

SEQ ID NO: 391 - DNA, 829 bp, Trabulsiella guamensis ATCC 49490
ttccctcaggatgccgtaccgcgcgtgtacgatgctcttgaggttatgaatggtagtgagcgtctggtgctggaagttcagcagcagctcggtggtggtatcgtacgtactatcgccatgggttcttccgacggtctgcgtcgtggtctggatgtaaaagatctcgagcatccgatcgaagtcccggtaggtaaagcaacgctgggtcgtatcatgaacgtgctgggtcagccgatcgatatgaaaggcgacatcggcgaagaagagcgttgggctatccaccgcgcagcaccgtcctacgaagagctgtccagctctcaggaactgctggaaaccggcatcaaagttatcgacctgatgtgtccgttcgcgaagggcggtaaagtcggtctgttcggtggtgcgggtgtaggtaaaaccgtaaacatgatggagctgattcgtaacatcgcgatcgagcactccggttactctgtgtttgcgggcgtgggtgaacgtactcgtgagggtaacgacttctaccacgaaatgaccgactccaacgttctggacaaagtatccctggtgtatggacagatgaacgagccgccgggaaaccgtctgcgcgttgcactgaccggtctgaccatggctgagaagttccgtgacgaaggtcgtgacgttctgctgttcgtcgataacatctaccgttacaccctggcgggtactgaagtatctgcactgctgggccgtatgccttcagcggtaggttaccagccgaccctggcggaagagatgggtgttcttcaggaacgtatcacctcaaccaaaaccggttctatcacctccg

SEQ ID NO: 392 - DNA, 835 bp, Yersinia bercovieri ATCC 43970
cgaattcccccaagacgctgtaccaaaagtgtacaacgcccttgaggttgaaggcacagctcagaagctggtgctggaagttcagcaacagctgggcggtggtgttgttcgttgtatcgcaatgggctcttccgatggtctgagccgcgggttgaaagtcatcaacctggaacacccaattgaagtgccggtgggtaaatcaactctgggccgtatcatgaacgtattgggtgacccaatcgacatgaaaggtcctatcggtgaagaagagcgttgggcaatccaccgcgaagcgccttcttacgaagagcttgccagctcgcaagatctgttagaaaccggtatcaaggtaatggatctgatttgtccgttcgctaagggcggtaaagtcggtctgttcggtggtgcgggtgtgggtaaaacagtcaacatgatggagctgattcgtaatattgcgattgagcactcaggttattctgtatttgccggtgtgggtgagcgtactcgtgagggtaacgacttctaccacgagatgactgactccaacgttctggacaaagtatccttggtttatggccagatgaatgagccaccaggtaaccgtctgcgcgttgcactgaccggcttgaccatggcggagaaattccgtgatgaaggtcgtgatgtactgttattcatcgataacatctatcgttataccctggccggtacagaggtatctgcactgctaggtcgtatgccatcagcggtaggctatcagccaacgctggcagaagagatgggtgtgttgcaggaacgtatcacttccaccaagacgggttcaatcacctccgta

SEQ ID NO: 393 - DNA, 812 bp, Yersinia enterocolitica ATCC 9610
gctgtaccaaaagtgtacaacgcccttgaggttgaaggcgcagctgagaagctggtgctggaagttcagcaacagctgggcggtggtgttgttcgttgtatcgcaatgggctcttccgatggtctgagccgtgggttgaaagtcatcaacctggaacacccaattgaagtgcctgtgggcaagtcaactctgggccgtatcatgaacgtattgggtgacccaatcgacatgaaaggtcctatcggcgaagaagagcgttgggcaatccatcgtgaagcgccttcttacgaagatcttgccagctcgcaagacttgttagaaaccggtatcaaggtaatggacttgatttgtccgttcgctaagggcggtaaagtcggtctgttcggtggtgcgggtgtaggtaaaacggtaaacatgatggagcttattcgtaacattgcgattgagcactcaggttattccgtatttgctggcgtgggtgagcgtactcgtgagggtaacgacttctaccacgagatgactgactccaacgttctggacaaagtatccttggtttatggccaaatgaatgagccaccaggtaaccgtctgcgcgttgcactgaccggcttgaccatggcggagaaattccgtgatgaaggtcgtgacgtattgctgttcatcgataacatctatcgctataccttagccggtacggaagtttccgcactgctgggtcgtatgccatctgccgtaggttaccagccaacgctggcagaagagatgggtgtgttgcaggaacgtattacttccaccaagacgggttcaatcac

SEQ ID NO: 394 - DNA, 802 bp, Yersinia frederiksenii ATCC 33641
aaagtgtacaacgcccttgaggttgaaggtactgctgagaagttagtactggaagttcagcaacagctgggcggtggtgttgctcgttgtatcgccatgggctcttccgatggtttgagccgcgggttgaaagttgtcaacctggaacacccaattgaagtaccggttggtaaatcaactctgggccgtatcatgaacgtattgggtgacccaatcgacatgaaaggtcctatcggtgaagaagagcgttgggcaatccaccgcgaagcgccttcttacgaagagcttgccagctcgcaagatctgttagaaaccggtatcaaggtaatggatctgatttgcccgttcgctaaaggcggtaaagtcggtctgttcggtggtgcgggtgtaggtaaaacggtaaacatgatggagctgatccgtaatatcgcgatcgagcactcaggttattccgtatttgcgggtgttggtgaacgtacccgtgagggtaacgacttctaccacgagatgactgactccaacgttctggacaaagtatccttggtttatggccagatgaatgagccaccaggtaaccgtcttcgcgttgcactgaccggtctgaccatggcggagaaattccgtgatgaaggtcgtgacgtattgctgttcatcgataacatctatcgttataccttggccggtacggaagtatccgcactgctgggtcgtatgccatctgcggtaggctatcagccaacgctggcagaagagatgggtgtgttgcaggaacgtattacttccaccaagacgggttcaatca

SEQ ID NO: 395 - DNA, 806 bp, Yersinia intermedia ATCC 29909
gctgtaccaagagtgtacaacgcccttgaggttgaaggcactgctgagaagctggtgctggaagttcagcaacagctaggcggtggtgttgttcgttgtatcgcaatgggctcttccgatggtctgagccgcgggttgaaagtcatcaacctggaacacccaattgaagtgccggttggtaaatcaactctgggccgtatcatgaacgtattgggtgacccaatcgacatgaaaggtcctatcggtgaagaagagcgttgggcaatccaccgcgaagcgccttcttacgaagagcttgccagctcacaagatttgttagaaaccggtatcaaagtaatggacttgatttgcccgttcgctaagggcggtaaagtgggtctgttcggtggtgcgggtgtaggtaaaacagtaaacatgatggagcttattcgtaacatcgcgattgagcactcaggttattctgtatttgctggtgtgggtgagcgtactcgtgagggtaacgacttctaccacgagatgactgactccaacgttctggacaaagtatccttggtgtatggccagatgaatgagccaccaggtaaccgtctgcgcgttgcactgaccggcctgaccatggcggagaaattccgtgatgaaggtcgtgacgtactgttgttcatcgataacatctatcgctataccttggccggtacggaagtatccgcactgctgggtcgtatgccatcagcggtaggctaccagccaacgctggcagaagagatgggtgtgttgcaggaacgtattacgtccaccaagacgggttc

SEQ ID NO: 396 - DNA, 806 bp, Yersinia pseudotuberculosis ATCC 29833
gctgtaccaaaagtgtacaacgcccttgaggtagaaggcacaactgaaaagttagtgctggaagttcagcaacagttgggcggtggtgttgttcgttgtatcgcaatgggctcttccgatggtctgagccgtgggttgaaagtaaccaacctggaacacccgatcgaagtaccggttggtaaagcgacccttggccgtatcatgaacgtattgggtgaaccaatcgacatgaaaggtcctatcggtgaagaagagcgttgggcaatccatcgcgaagcgccttcttatgaagagcttgctagctcacaagatctgttagaaaccggtatcaaggttatggacctgatttgtccgtttgctaagggcggtaaagtcggtctgttcggtggtgcgggtgtaggtaaaacagtaaacatgatggagctgatccgtaacatcgcgatcgagcactctgggtattctgtatttgccggtgtaggtgagcgtacccgtgagggtaatgacttctaccatgaaatgactgactccaacgttttggacaaagtatccttggtttacggccagatgaatgagccaccaggtaaccgtctacgcgttgcactgaccggcctgaccatggcggagaaattccgtgatgaaggtcgtgacgtactgctgttcatcgataatatctatcgttataccctagctggtacggaagtatccgcattgctgggtcgtatgccatcagcggtaggttatcagccaacactggctgaagagatgggtgtgttgcaggaacgtattacttccactaagacgggttc

SEQ ID NO: 397 - DNA, 829 bp, Yersinia rohdei ATCC 43380
ttcccccaagacgctgtaccaaaagtgtacaacgcccttgaggttgaaggtgcagctgagaagcttgtgctggaagttcagcagcagctgggcggtggtgttgttcgttgtatcgcaatgggctcttccgatggtttgagccgtgggttgaaagttatcaacctggaacacccaattgaagtgccagttggtaaatcaactctgggccgtatcatgaacgtattgggtgacccaatcgacatgaaaggccctatcggtgaagaagagcgttgggcaatccaccgtgaagcgccttcttacgaagagcttgccagctcgcaagatctgttagaaaccggtatcaaggtaatggatctgatttgtccgttcgctaagggcggtaaagtcggtctgttcggtggtgcgggtgttggtaaaacagtaaacatgatggagcttattcgtaacatcgcgattgagcactcaggttattctgtatttgccggggtaggtgaacgtactcgtgagggtaacgacttctaccacgagatgactgactccaacgttctggacaaagtatccttggtttatggccagatgaatgagccaccaggtaaccgtctgcgcgttgcactgaccggcttgaccatggcggaaaaattccgtgatgaaggccgtgacgtattgctgttcatcgataacatttatcgttataccctagccggtacggaagtatccgcactgctgggtcgtatgccatctgcggtaggctatcagccaacactggcagaagagatgggtgtgttgcaggaacgtattacttccactaagacgggttcaatcacctccg

SEQ ID NO: 398 - DNA, 819 bp, Yokenella regensburgei ATCC 35313
atgccgtaccgcgcgtgtacgatgctcttgaggtacaaaatggtaacgagaaactggtgctggaagctcagcagcagctcggcggcggtatcgtgcgtactatcgccatgggttcttccgacggtctgcgtcgtggtctggaagttaaagacctcgagcacccgatcgaagtcccggtaggtaaagcaaccctgggccgtatcatgaacgtcctgggtcagccgatcgacatgaaaggcgacatcggtgaagaagagcgttgggctatccaccgcgcagcaccttcctatgaagagctgtccagctctcaggaactgctggaaaccggtatcaaagtaatggatctgatctgcccgttcgctaagggtggtaaagtcggtctgttcggtggtgcgggtgtaggtaaaactgtaaacatgatggagcttatccgtaacatcgcgattgagcactccggttactctgtgtttgcaggcgtgggtgaacgtactcgtgagggtaacgacttctaccacgaaatgaccgactccaacgtactggataaagtatccctggtgtacggccagatgaacgagccgccgggaaaccgtctgcgcgttgcgctgaccggcctgaccatggctgagaaattccgtgacgaaggccgtgacgttctgctgttcgtcgataacatctaccgttataccctggccggtacggaagtatccgcactgctgggtcgtatgccttctgcggtaggttatcagccaactctggcggaagagatgggtgttcttcaggaacgtatcacctctaccaaaaccggttctatcacctccg

SEQ ID NO: 399 - DNA, 1097 bp, Yarrowia lipolytica ATCC 38295
aagcttaaggctgagcgagagcgaggtatcaccattgatatcgctctctggaagttccagacccctaagtactacgtcaccgttattgatgctcccggtcaccgagatttcatcaagaacatgattaccggtacttcccaggctgactgcgccatcctcatcattgctggtggtgttggtgagttcgaggctggtatctccaaggatggtcagacccgagagcacgccctgctcgctttcaccctcggtgttaagcagctcattgttgctatcaacaagatggactccgtcaagtggtctcaggatcgatacctcgagatttgcaaggagactgccaacttcgtcaagaaggtcggttacaaccccaaggctgtccccttcgtccccatttccggatggaacggtgacaacatgatcgagccctctaccaactgtgactggtacaagggatggaccaaggagaccaaggccggcgagatcaagggtaagaccctcctcgaggccattgatgccattgagccccccgtgcgaccccacgacaagcccctccgacttcccctccaggatgtctacaagatcggtggtatcggcacagtgcccgttggccgagtcgagaccggtgttatcaaggccggtatggktgttaccttcgctcccgccaacgtgaccactgaggtcaagtctgtcgagatgcaccacgagatcctccccgatggaggtttccccggtgacaacgtcggtttcaacgtcaagaacgtttccgtcaaggatatccgacgaggtaacgttgctggtgactccaagaacgacccccccaagggctgcgactctttcaacgctcaggtcattgttcttaaccaccccggtcagatcggtgctggttacgctcccgtccttgattgccacactgcccacattgcttgcaagttcgacaccctgatcgagaagatcgaccgacgaaccggtaagaagatggaggactcccccaagttcatcaagtctggtgatgctgccattgtcaagatggttccctccaagcccatgtgtgtcgaggccttcactgagtacccccctcttggtcgattcgccgtccgaga

SEQ ID NO: 400 - DNA, 1233 bp, Absidia corymbifera ATCC 46775
  misc_feature (1)...(1233): n=a,t,c or g
caagcttaaggctgaacgtgagcgtggtatcaccatcgatatcgctctctggaagttcgagactcccaagtaccacgttaccgtcattgatgcccctggccatcgtgatttcatcaagaacatgattactggtacttcccaagctgactgcggtatcttgattattgctgctggtactggtgaattcgaagctggtatctccaaggatggtcaaacccgtgaacacgctttgcttgctttcacccttggtgtccgtcaattgattgtcgctatcaacaagatggattccaccaagtactctgaggcccgttacaacgaaattgtcaaggaagtctccaccttcatcaagaagattggtttcaaccccaagtccgttcctttcgtccctatctctggctggaacggtgacaacatgttggaggartccaccaacatgccttggttcaagggatggaacaaggagactaaggctggtgccaagacyggcaagacccttcttgaagccattgacaacattgatccccctgttcgtccttccgacaagccccttcgtcttccccttcaagatgtctacaagatcggtggtattggtacagttcctgtcggtcgtgttgagactggtgtcatcaagcctggtatggttgtcaccttcgctcccgctaacgtcaccactgaagtcaagtccgtygaaatgcaccacgagcaacttgctgaaggtgttcccggtgacaacgtcggtttcaacgtcaagaacgtttccgtcaaggatatccgccgtggtaacgtytgctctgactccaagaacgaccccgccaaggaatccgcttccttcaccgctcaagttattgtcttgaaccaccctggtcarattggtgctggttactctcctgtcttggattgccacactgctcacattgcatgcaagttctytkagcttcttkagaagatcgatygtcgttccggtaagtaaatantttggtttrggatatgggtattgggcttaatctytggattttgcctcaattgctccttccttgatctttctcgattactttttgatcatttgctaatccaaaccctttccatttyattgaaaacaggtaagaagttggaagactcccccaagttcgtcaagwsyggtgactctgcyatcgtcaagatggttccttccaagcccatgtgcgttgaagcctacactgaatatcctcctcttggtcgtttcgctgtccgtga

SEQ ID NO: 401 - DNA, 1151 bp, Alternaria alternata ATCC 62099
caagttgaaggccgagcgtgagcgtggtatcaccatcgacattgctctctggaagttcgagactcccaaggttagtacccctctgcctactacatcaagttctttacaatgctaacatgttgtactcagtactatgtcaccgtcattgacgcccccggtcaccgtgatttcatcaagaacatgatcactggtacctcccaggccgactgcgctattctcatcattgccgccggtactggtgagttcgaggctggtatctccaaggatggccagactcgtgagcacgctctcctcgcttacaccctcggtgtcaagcagctcatcgttgccatcaacaagatggacaccaccaagtggtccgaggagcgttaccaggagatcatcaaggagacctccaacttcatcaagaaggtcggctacaaccccaagcacgttcccttcgtccccatctccggtttcaacggtgacaacatgattgaggcctcatccaactgcccctggtacaagggttgggagaaggagaccaaggccaaggccactggtaagaccctcctcgaggccatcgacgccatcgaccctyccagccgtcccaccgacaagcccctccgtcttcccctycaggatgtttacaagattggtggtattggcacggtgcccgtcggtcgtgtcgagaccggtatcatcaaggccggtatggtcgtcaccttcgcccccgctggtgtcaccactgaagtcaagtccgtcgagatgcaccacgagcagctcaccgagggtgtccccggtgacaacgtcggcttcaacgtcaagaacgtctccgtcaaggagatccgtcgtggtaacgttgccggtgactccaagaacgacccccccaagggtgccgagtccttcaacgcccaggtcatcgtcctcaaccaccctggtcaggtcggtgctggttacgccccagtcctcgactgccacaccgcccacattgcttgcaagttctctgagctcctcgagaagattgaccgccgtaccggaaagtctgttgagaactctcccaagttcatcaagtccggtgacgccgccatcgtcaagatggttccctccaagcccatgtgcgttgaggctttcactgactaccctcctctcggtcgtttcgctgtccgtga

SEQ ID NO: 402 - DNA, 1283 bp, Aspergillus flavus ATCC 26947
caagctcaagtccgagcgtgagcgtggtatcaccatcgatatcgccctctggaagttccagacctccaagtatgaggtcaccgtcattggtaagcatttgagttccaacctacgttgcccaacatttacagtcatctaacaaagttcaatagatgcccccggtcaccgtgacttcatcaagaacatgatcactggtacttcccaggctgactgcgctatcctcatcattgcctccggtactggtgaattcgaggctggtatctccaaggatggtcagacccgtgagcacgctctgctcgctttcaccctcggtgtccgtcagctcatcgttgccctcaacaagatggacacctgcaagtggtctcaggatcgttacaacgaaatcgttaaggagacttccaacttcatcaagaaggtcggatacaaccccaagagcgttcctttcgtccccatctccggtttcaacggtgacaacatgattgaggcctccaccaactgcccctggtacaagggttgggagaaggagaccaaggctggcaagtccaccggtaagacccttctcgaggccatcgatgccatcgagccccccgtccgtcccaccgacaagcctctccgtcttcccctycaggatgtctacaagatctctggtatcggtactgtgcccgtcggtcgtgtcgagactggtgtcatcaagcctggtatggtcgttactttcgctcctgccaacgtgaccactgaagtcaagtccgttgaaatgcaccaccagcagctccaggccggtaaccccggtgacaacgttggtttcaacgtcaagaacgtctccgtcaaggaagtccgccgtggtaacgttgccggtgactccaagaacgacccccctgctggctgcgattccttcaacgcccaggtcatcgtccttaaccaccccggtcaggtcggcaacggttacgctcccgtcctggactgccacaccgctcacattgcttgcaagttcgctgagctccttgagaagattgaccgccgtaccggtaaatctgttgaggacaagcccaagttcatcaagtctggtgatgctgccatcgtcaagatgattccctccaagcccatgtgtgtggagtctttcactgacttcccccctcttggtcgtttcgctgtccgtgacgtaagtttttccctcttgactatcttcacaatttttcacatattttcacgcctcgtcccactctttttcctcccttcctctttggttcccctttttgcctgcaagttctctatagctaacatga

SEQ ID NO: 403 - DNA, 1103 bp, Aspergillus fumigatus strain DAL-95
tccgagcgtgagcgtggtatcaccatcgacattgccctctggaagttccagactcccaagtatgaggtcactgtcatcggtaagctcgactcgccccgatatgttttggtgctgtagctaacacgatctgaagatgcccccggtcaccgtgacttcatcaagaacatgatcactggtacctcccaggctgactgcgctatcctcatcattgcctccggtactggtgagttcgaggctggtatctccaaggatggccagacccgtgagcacgctctgctggctttcaccctcggtgtcaagcagctcatcgtcgccctcaacaagatggacacctgcaagtggtccgaggatcgttacaacgaaattgtcaaggaaacctccaacttcatcaagaaggtcggctacaaccccaaggccgttcccttcgtccccatctctggcttcaacggtgacaacatgcttgagccctcctccaactgcccctggtacaagggatgggagaaggagaccaaggccggcaaggtcactggtaagaccctcatcgaggccatcgacgccattgagccccctgtccgtccctccaacaagcccctccgtcttcccctccaggatgtctacaagatctctggtatcggaacggtccctgtcggccgtgtcgagaccggtatcatcaagcccggcatggtcgtcaccttcgcccccgccaacgtcaccactgaagtcaagtccgtcgagatgcaccaccagcagctccaggagggtgtccccggtgacaacgtcggtttcaacgtcaagaacgtttccgtcaaggaagtccgccgtggtaacgtctgcggtgactccaagaacgatccccctcagggtgctgcctccttcaacgcccaggtcatcgtcctcaaccaccccggtcaggtcggcgctggttacgcccccgtcctcgactgccacactgcccacattgcttgcaagttctctgagctgcttgagaagattgaccgccgtaccggcaagtctgttgagaacaaccccaagttcatcaagtccggtgatgccgccatcgtgaagatggttccttccaagcccatgtgtgtcgagtccttcac

SEQ ID NO: 404 - DNA, 1149 bp, Aspergillus fumigatus strain WSA-172
aagctcaagtccgagcgtgagcgtggtatcaccatcgacattgccctctggaagttccagactcccaagtatgaggtcactgtcatcggtaagctcgactcgccccgatatgttttggtgctgtagctaacacgatctgaagatgcccccggtcaccgtgacttcatcaagaacatgatcactggtacctcccaggctgactgcgctatcctcatcattgcctccggtactggtgagttcgaggctggtatctccaaggatggccagacccgtgagcacgctctgctggctttcaccctcggtgtcaagcagctcatcgtcgccctcaacaagatggacacctgcaagtggtccgaggatcgttacaacgaaattgtcaaggaaacctccaacttcatcaagaaggtcggctacaaccccaaggccgttcccttcgtccccatctctggcttcaacggtgacaacatgcttgagccctcctccaactgcccctggtacaagggatgggagaaggagaccaaggccggcaaggtcactggtaagaccctcatcgaggccatcgacgccattgagccccctgtccgtccctccaacaagcccctccgtcttcccctccaggatgtctacaagatctctggtatcggaacggtccctgtcggccgtgtcgagaccggtatcatcaagcccggcatggtcgtcaccttcgcccccgccaacgtcaccactgaagtcaagtccgtcgagatgcaccaccagcagctccaggagggtgtccccggtgacaacgtcggtttcaacgtcaagaacgtttccgtcaaggaagtccgccgtggtaacgtctgcggtgactccaagaacgatccccctcagggtgctgcctccttcaacgcccaggtcatcgtcctcaaccaccccggtcaggtcggcgctggttacgcccccgtcctcgactgccacactgcccacattgcttgcaagttctctgagctgcttgagaagattgaccgccgtaccggcaagtctgttgagaacaaccccaagttcatcaagtccggtgatgccgccatcgtgaagatggttccttccaagcccatgtgtgtcgagtccttcactgactacccccctctgggtcgtttcgccgtccgtgac

SEQ ID NO: 405 - DNA, 1151 bp, Aspergillus niger ATCC 9508
caagctcaagtccgagcgtgagcgtggtatcaccatcgacattgccctctggaagttccagactggcaagtatgaggtcaccgtcattggtatgtactcacagagttctcttttcatcaaagcaatatactaacgtccatcatagacgcccccggtcaccgtgacttcatcaagaacatgatcactggtacctcccaggctgactgcgctatcctcatcattgcctccggtactggtgagttcgaggctggtatctccaaggatggccagactcgtgagcacgctctgcttgctttcaccctcggtgtccgccagctcatcgttgccctcaacaagatggacacctgcaagtggtccgaggaccgttacaacgaaatcgttaaggagacctccaacttcatcaagaaggtcggatacaaccccaagggtgttcctttcgtccccatctccggtttcaacggtgacaacatgctcgagccctcccccaactgcccctggtacaagggttgggagaaggagaccaaggccggcaaggtcaccggtaagaccctccttgaggccatcgacgccatcgagccccccgtccgtccctccaacaagcccctccgtcttcccctccaggatgtctacaagatctccggtattggaactgttcccgtcggtcgtgtcgagaccggtatcattgcccctggtatggtcgtgaccttcgctcccgccaacgtcaccactgaagtcaagtccgttgagatgcaccaccagcagctcaaggaaggtgtccccggtgacaacgttggtttcaacgtcaagaacgtttccgtcaaggaggttcgccgtggtaacgttgccggtgactccaagaacgacccccctcttggctgtgagagcttcaccgcccaggtcatcgtcctcaaccaccccggtcaggtcggcgctggttacgctcccgtcctggactgccacactgctcacattgcttgcaagttcgctgagctccttgagaagattgaccgccgtaccggaaagtctgttgaatcttcccccaagttcatcaagtccggtgacgctgccatcgtcaagatgattccctccaagcccatgtgtgttgaggctttcactgactacccccctcttggtcgtttcgccgtccgcga

SEQ ID NO: 406 - DNA, 1093 bp, Blastoschizomyces capitatus ATCC 10663
gcttaaagctgaacgtgaacgtggtatcaccattgatatcgctctctggaagttcgaaactcctaagtactacgttactgttattgatgctccaggtcaccgtgatttcatcaagaacatgattactggtacttcccaagccgattgcgccattcttatcattgctgccggtgtcggtgaattcgaagctggtatctccaaggaaggtcaaaccagagaacacgctcttctcgctttcacccttggtgtcagacaacttatcattgccatcaacaagatggactctgtcaagtgggaccaaaagagatacgaagaaatcgtcaaggaggcttccaacttcgtcaagaaggttggttacaaccccaagtctgttccattcgttcctatctctggttggaacggtgacaacatgttggaacctaccaccaacgccccatggtacaagggatggaccaaggaaaccaaggctggtgccactaagggtatgactcttattgaagccattgacgccattgaaccaccagtaagaccatccgacaagccactccgtctcccactccaagatgtttacaagattggtggtatcggaactgtgccagtcggccgtgtcgaaaccggtatcatcaaggccggtatggtcgttacctttgctccaccaatggtcacaactgaagttaagtccgttgaaatgcaccacgaacaacttgctcaaggtaacccaggtgacaacgttggtttcaacgtcaagaacgtttccgttaaggaaatcagacgtggtaacgtctgtggtgactccaagaacgatccaccaaagggctgcgaatctttcaacgctcaagttatcgtcttgaaccaccctggtcaaatctctgctggttactctccagttctcgattgccacactgcccacattgcctgcagattcgacgaactccttgaaaagatcgaccgtcgttctggtaagaagattgaagactctccaaagtttgtcaagtctggtgatgccgctatcgtcaagatgatcccaaccaagccaatgtgcgttgaaaccttcactgaatacccaccacttggtcgtttcgccgtccgtgat

SEQ ID NO: 407 - DNA, 1101 bp, Candida albicans ATCC 10231
cttggacaaattgaaggctgaaagagaaagaggtatcaccattgatatcgctttgtggaaattcgaaactccaaaataccacgttaccgtcattgatgctccaggtcacagagatttcatcaagaatatgatcactggtacttctcaagctgattgtgctattttgattattgctggtggtactggtgaattcgaagccggtatttctaaggatggtcaaaccagagaacacgctttgttggcttacactttgggtgtcaaacaattgattgttgctgtcaacaagatggactctgtcaaatgggacaaaaacagatttgaagaaatcatcaaggaaacctccaacttcgtcaagaaggttggttacaacccaaagactgttccattygttccaatctctggttggaatggtgacaacatgattgaaccatccaccaactgtccatggtacaagggttgggaaaaggaaaccaaatccggtaaagttactggtaagaccttgttagaagctattgacgctattgaaccaccaaccagaccaaccgacaaaccattgagattgccattgcaagatgtttacaagatcggtggtattggtactgtgccagtcggtagagttgaaactggtatcatcaaagccggtatggttgttactttcgccccagctggtgttaccactgaagtcaaatccgttgaaatgcatcacgaacaattggctgaaggtgttccaggtgacaatgttggtttcaacgttaagaacgtttccgttaaagaaattagaagaggtaacgtttgtggtgactccaagaacgatccaccaaagggttgtgactctttcaatgcccaagtcattgttttgaaccatccaggtcaaatctctgctggttactctccagtcttggattgtcacactgcccacattgcttgtaaattcgacactttggttgaaaagattgacagaagaactggtaagaaattggaagaaaatccaaaattcgtcaaatccggtgatgctgctatcgtcaagatggtcccaaccaaaccaatgtgtgttgaagctttcactgactacccaccattaggtagattcgctgtcagaga

SEQ ID NO: 408 - DNA, 1089 bp, Candida albicans ATCC 18804
gaaggctgaaagagaaagaggtatcaccattgatatcgctttgtggaaattcgaaactccaaaataccacgttaccgtcattgatgctccaggtcacagagatttcatcaagaatatgatcactggtacttctcaagctgattgtgctattttgattattgctggtggtactggtgaattcgaagccggtatttctaaggatggtcaaaccagagaacacgctttgttggcttacactttgggtgtcaaacaattgattgttgctgtcaacaagatggactctgtcaaatgggacaaaaacagatttgaagaaatcatcaaggaaacctccaacttcgtcaagaaggttggttacaacccaaagactgttccattcgttccaatctctggttggaatggtgacaacatgattgaaccatccaccaactgtccatggtacaagggttgggaaaaggaaaccaaatccggtaaagttactggtaagaccttgttagaagctattgacgctattgaaccaccaaccagaccaaccgacaaaccattgagattgccattgcaagatgtttacaagatcggtggtattggtactgtgccagtcggtagagttgaaactggtatcatcaaagccggtatggttgttactttcgccccagctggtgttaccactgaagtcaaatccgttgaaatgcatcacgaacaattggctgaaggtgttccaggtgacaatgttggtttcaacgttaagaacgtttccgttaaagaaattagaagaggtaacgtttgtggtgactccaagaacgatccaccaaagggttgtgactctttcaatgcccaagtcattgttttgaaccatccaggtcaaatctctgctggttactctccagtcttggattgtcacactgcccacattgcttgtaaattcgacactttggttgaaaagattgacagaagaactggtaagaaattggaagaaaatccaaaattcgtcaaatccggtgatgctgctatcgtcaagatggtcccaaccaaaccaatgtgtgttgaagctttcactgactacccaccattaggtagattcgctgtcagaga

SEQ ID NO: 409 - DNA, 1101 bp, Candida albicans ATCC 56884
cttggacaaattgaaggctgaaagagaaagaggtatcaccattgatatcgctttgtggaaattcgaaactccaaaataccacgttaccgtcattgatgctccaggtcacagagatttcatcaagaatatgatcactggtacttctcaagctgattgtgctattttgattattgctggtggtactggtgaattcgaagccggtatttctaaggatggtcaaaccagagaacacgctttgttggcttacactttgggtgtcaaacaattgattgttgctgtcaacaagatggactctgtcaaatgggacaaaaacagatttgaagaaatcatcaaggaaacctccaacttcgtcaagaaggttggttacaacccaaagactgttccattcgttccaatctctggttggaatggtgacaacatgattgaaccatccaccaactgtccatggtacaagggttgggaaaaggaaaccaaatccggtaaagttactggtaagaccttgttagaagctattgacgctattgaaccaccaaccagaccaaccgacaaaccattgagattgccattgcaagatgtttacaagatcggtggtattggtactgtgccagtcggtagagttgaaactggtatcatcaaagccggtatggttgttactttcgccccagctggtgttaccactgaagtcaaatccgttgaaatgcatcacgaacaattggctgaaggtgttccaggtgacaatgttggtttcaacgttaagaacgtttccgttaaagaaattagaagaggtaacgtttgtggtgactccaagaacgatccaccaaagggttgtgactctttcaatgcccaagtcattgttttgaaccatccaggtcaaatctctgctggttactctccagtcttggattgtcacactgcccacattgcttgtaaattcgacactttggttgaaaagattgacagaagaactggtaagaaattggaagaaaatccaaaattcgtcaaatccggtgatgctgctatcgtcaagatggtcccaaccaaaccaatgtgtgttgaagctttcactgactacccaccattaggtagattcgctgtcagaga

SEQ ID NO: 410 - DNA, 1102 bp, Candida albicans ATCC 60193
cttggacaaattgaaggctgaaagagaaagaggtatcaccattgatatcgctttgtggaaattcgaaactccaaaataccacgttaccgtcattgatgctccaggtcacagagatttcatcaagaatatgatcactggtacttctcaagctgattgtgctattttgattattgctggtggtactggtgaattcgaagccggtatttctaaggatggtcaaaccagagaacacgctttgttggcttacactttgggtgtcaaacaattgattgttgctgtcaacaagatggactctgtcaaatgggacaaaaacagatttgaagaaatcatcaaggaaacctccaacttcgtcaagaaggttggttacaacccaaagactgttccattcgttccaatctctggttggaatggtgacaacatgattgaaccatccaccaactgtccatggtacaagggttgggaaaaggaaaccaaatccggtaaagttactggtaagaccttgttagaagctattgacgctattgaaccaccaaccagaccaaccgacaaaccattgagattgccattgcaagatgtttacaagatcggtggtattggtactgtgccagtcggtagagttgaaactggtatcatcaaagccggtatggttgttactttcgccccagctggtgttaccactgaagtcaaatccgttgaaatgcatcacgaacaattggctgaaggtgttccaggtgacaatgttggtttcaacgttaagaacgtttccgttaaagaaattagaagaggtaacgtttgtggtgactccaagaacgatccaccaaagggttgtgactctttcaatgcccaagtcattgttttgaaccatccaggtcaaatctctgctggttactctccagtcttggattgtcacactgcccacattgcttgtaaattcgacactttggttgaaaagattgacagaagaactggtaagaaattggaagaaaatccaaaattcgtcaaatccggtgatgctgctatcgtcaagatggtcccaaccaaaccaatgtgtgttgaagctttcactgactacccaccattaggtagattcgctgtcagagat

SEQ ID NO: 411 - DNA, 1102 bp, Candida albicans ATCC 90028; identical to SEQ ID NO: 410

SEQ ID NO: 412 - DNA, 1101 bp, Candida dubliniensis strain NCPF 3108
cttggataaattgaaggctgaaagagaaagaggtatcaccattgatatcgctttgtggaaattcgaaactccaaaataccacgttaccgtcattgatgctccaggtcacagagatttcatcaagaacatgatcactggtacttctcaagctgattgtgctattttgattattgctggtggtactggtgaattcgaagccggtatttctaaggatggtcaaaccagagaacacgctttgttggcttacactttgggtgtcaaacaattgattgttgctgtcaacaagatggactctgtcaaatgggacaaaaacagatttgaagaaatcatcaaggaaacctctaacttcgtcaagaaggttggttacaacccaaagactgttccattcgttccaatctctggttggaatggtgacaacatgattgaagcttccaccaactgtccatggtacaagggttgggaaaaggaaaccaaatccggtaaggttactggtaagaccttgttagaagctattgatgctattgaaccaccaaccagaccaaccgacaaaccattgagattgccattgcaagatgtttacaagatcggtggtattggtactgtgccagtcggtagagttgaaactggtgtcattaaagccggtatggttgtcacttttgccccagctggtgttaccactgaagtcaaatccgttgaaatgcatcacgaacaattggctgaaggtgttccaggtgacaatgttggtttcaacgttaagaatgtttctgtcaaagaaattagaagaggtaacgtttgtggtgactccaagaacgatccaccaaagggttgtgactctttcaatgcccaagtcattgtcttgaaccatccaggtcaaatctctgctggttactctccagtcttggattgtcacactgcccacattgcttgtaaattcgacactttggttgaaaagattgacagaagaactggtaagaaattggaagaaaatccaaaattcgtcaaatccggtgacgctgctatygtcaagatggtcccaaccaaaccaatgtgtgttgaagctttcactgactacccaccattaggtagattcgctgtcagaga

SEQ ID NO: 413 - DNA, 1098 bp, Candida catenulata ATCC 10565
ggacaagcttaaggctgagcgtgagagaggtatcaccattgacattgccttgtggaagttcgagactcccaagtaccacgtcactgtcattgacgcccccggtcacagagatttcatcaagaacatgatcactggtacctcgcaggctgactgtgctatcttgatcattgcttccggtgtcggtgagttcgaggctggtatctccaaggacggtcagacccgtgagcacgccttgttggcctacaccttgggtgtcaagcagttgatcgttgccatcaacaagatggactccgtcaagtgggacaagaacagattcgaggagattgtcaaggagaccaccaacttcgtcaagaaggttggttacaaccccaaggctgtccccttcgtccccatctctggctggaacggtgacaacatgattgaggcctccaccaactgcccctggtacaagggctgggagaaggagaccaaggccggtaagtctaccggtaagaccttgttggaggccattgacgccattgagccccctaccagacccaccgacaagcccttgagattgcccttgcaggatgtctacaagatcggtggtattggtacggtgcccgtcggccgtgtcgagaccggtgtcatcaagcccggtatggtcgtcaccttcgcccccgctggtgtcaccactgaagtcaagtccgtcgagatgcaccacgagcagttgtccgagggtgtccccggtgacaacgttggtttcaacgtcaagaacgtctctgttaaggagatcagacgtggtaacgtctgcggtgactccaagaacgacccccccatgggttgctcttctttcaacgcccaggttatcgtgttgaaccaccccggtcagatctctgccggttactctcccgtcttggactgccacaccgcccacattgcttgcaagttcgccgagttgatcgagaagattgacagacgtaccggtaagtccatggaggctaaccccaagttcgtcaagtctggtgacgccgccatcgtcaagatggagcccactaagcccatgtgtgttgaggccttcactgacttccctcctttgggtagattcgccgtcagaga

SEQ ID NO: 414 - DNA, 1102 bp, Candida dubliniensis strain NCPF 3949
cttggataaattgaaggctgaaagagaaagaggtatcaccattgatatcgctttgtggaaattcgaaactccaaaataccacgttaccgtcattgatgctccaggtcacagagatttcatcaagaacatgatcactggtacttctcaagctgattgtgctattttgattattgctggtggtactggtgaattcgaagccggtatttctaaggatggtcaaaccagagaacacgctttgttggcttacactttgggtgtcaaacaattgattgttgctgtcaacaagatggactctgtcaaatgggacaaaaacagattcgaagaaatcatcaaggaaacctctaacttcgtcaagaaggttggttacaacccaaagactgttccattcgttccaatctctggttggaatggtgacaacatgattgaagcttccaccaactgtccatggtacaagggttgggaaaaggaaaccaaatccggtaaggttactggtaagaccttgttagaagctattgatgctattgaaccaccaaccagaccaaccgacaaaccattgagattgccattgcaagatgtttacaagatcggtggtattggtactgtgccagtcggtagagttgaaactggtgtcattaaagccggtatggttgtcacttttgccccagctggtgttaccactgaagtcaaatccgttgaaatgcatcacgaacaattggttgaaggtgttccaggtgacaatgttggtttcaacgttaagaatgtttctgtcaaagaaattagaagaggtaacgtttgtggtgactccaagaacgatccaccaaagggttgtgactctttcaatgcccaagtcattgtcttgaaccatccaggtcaaatctctgctggttaytctccagtcttggattgtcacactgcccacattgcttgtaaattcgacactttggttgaaaagattgacagaagaactggtaagaaattggaagaaaatccaaaattcgtcaaatccggtgacgctgctatygtcaagatggtcccaaccaaaccaatgtgtgttgaagctttcactgactacccaccattaggtagattcgctgtcagagat

SEQ ID NO: 415 - DNA, 1102 bp, Candida dubliniensis CBS 7987
cttggataaattgaaggctgaaagagaaagaggtatcaccattgatatcgctttgtggaaattcgaaactccaaaataccacgttaccgtcattgatgctccaggtcacagagatttcatcaagaacatgatcactggtacttctcaagctgattgtgctattttgattattgctggtggtactggtgaattcgaagccggtatttctaaggatggtcaaaccagagaacacgctttgttggcttacactttgggtgtcaaacaattgattgttgctgtcaacaagatggactctgtcaaatgggacaaaaacagattygaagaaatcatcaaggaaacctctaacttcgtcaagaaggttggttacaacccaaagactgttccattcgttccaatctctggttggaatggtgacaacatgattgaagcttccaccaactgtccatggtacaagggttgggaaaaggaaaccaaatccggtaaggttactggtaagaccttgttagaagctattgatgctattgaaccaccaaccagaccaaccgacaaaccattgagattgccattgcaagatgtttacaagatcggtggtattggtactgtgccagtcggtagagttgaaactggtgtcattaaagccggtatggttgtcacttttgccccagctggtgttaccactgaagtcaaatccgttgaaatgcatcacgaacaattggttgaaggtgttccaggtgacaatgttggtttcaacgttaagaatgtttctgtcaaagaaattagaagaggtaacgtttgtggtgactccaagaacgatccaccaaagggttgtgactctttcaatgcccaagtcattgtcttgaaccatccaggtcaaatctctgctggttaytctccagtcttggattgtcacactgcccacattgcttgtaaattcgacactttggttgaaaagattgacagaagaactggtaagaaattggaagaaaatccaaaattcgtcaaatccggtgacgctgctatygtcaagatggtcccaaccaaaccaatgtgtgttgaagctttcactgactacccaccattaggtagattcgctgtcagagat

SEQ ID NO: 416 - DNA, 1094 bp, Candida famata ATCC 62894
aattgaaggctgaaagagaaagaggtatcaccattgatatcgctttatggaaattcgaaactccaaaataccacgttaccgttattgatgctccaggtcacagagatttcatcaagaacatgattactggtacttctcaagctgattgtgctattttrattattgctggtggtgtcggtgaattcgaagccggtatctctaaggatggtcaaaccagagaacacgctttattggcttacaccttaggtgttagacaattgattgttgccgtcaacaagatggactctgttaaatgggacaaggctagattcgaagaaatcatcaaggaaacctctaacttcgtcaagaaggttggttacaaccctaagactgttcctttcgtyccaatttctggatggaacggtgacaacatgattgaagcctccaccaactgtccatggtacaagggttgggaaaaggaaaccaaggctggtaaatctactggtaagactttgttagaagccattgatgccattgaaccaccaaccagaccaaccgaaaagccattgagattaccattacaagatgtctacaagatcggtggtattggtactgtgccagtcggtagagttgaaaccggtgttatcaagggtggtatggttgttacctttgccccagccggtgtcactaccgaagtcaaatccgttgaaatgcaccacgaacaattagctgaaggtgttccaggtgacaatgttggtttcaacgtcaagaacgtttccgttaaggaaatcagaagaggtaacgtttgtggtgactccaagaacgacccaccaaagggtgctgaatctttcaccgctcaagttattgtcttgaaccacccaggtcaratctctgctggttactctccagtcttagattgtcacaccgcccacattgcttgtaaattcgatgctttactcgaaaagattgacagaagatccggtaagaaattagaagacgaaccaaaattcgtcaagtccggtgatgctgctatcgtcaagatggtcccaaccaaaccaatgtgtgttgaagctttcactgaatacccaccattaggtagattcgctgttagagat

SEQ ID NO: 417 - DNA, 1101 bp, Candida glabrata ATCC 66032
tttggacaagttgaaggctgaaagagaaagaggtatcactatcgatatcgctttgtggaagttcgaaactccaaagtaccacgtyaccgttatcgatgcyccaggtcacagagatttcatcaagaacatgattactggtacttctcaagctgactgtgctatcttgattattgctggtggtgtcggtgaattcgaagcyggtatctccaaggatggtcaaaccagagaacacgctctattggctttcaccctaggtgttagacaattgattgtygctgtcaacaagatggactctgtcaagtgggatgaatccagattcgctgaaatcgttaaggaaacctccaacttcatcaagaaggtcggttacaacccaaagactgttccattcgtcccaatctctggttggaacggtgacaacatgattgaagccaccaccaacgcttcctggtacaagggttgggaaaaggaaaccaaggctggtgtcgtcaagggtaagaccttgttggaagccattgacgctatcgaaccaccaaccagaccaactgacaagccattgagattgccattgcaagatgtctacaagatcggtggtatcggtacggtgccagtcggtagagtcgaaaccggtgtcatcaagccaggtatggttgttaccttcgccccagctggtgttaccactgaagtcaagtccgttgaaatgcaccacgaacaattgactgaaggtttgccaggtgacaacgttggtttcaacgttaagaacgtttccgttaaggaaatcagaagaggtaatgtctgtggtgactccaagaacgacccaccaaaggctgctgcttctttcaacgctaccgtcattgtcttgaaccacccaggtcaaatctctgctggttactctccagttttggactgtcacaccgcccacattgcttgtaagttcgaagaattgttggaaaagaacgacagaagatccggtaagaagttggaagactctccaaagttcttgaagtccggtgacgctgctttggttaagttcgttccatccaagccaatgtgtgtcgaagctttctccgactacccaccattgggtagattcgctgtcagaga

SEQ ID NO: 418 - DNA, 1080 bp, Candida guilliermondii ATCC 6260
agagaaagaggtatcaccattgacattgctttgtggaaattcgagactccaaagtaccacgttacygtcattgatgccccaggtcacagagatttcatcaagaacatgatcactggtacttctcaagctgactgtgctattttgattattgctggtggtaccggtgaattcgaagctggtatctctaaggatggtcaaaccagagagcacgctttgttggcttacaccttgggtgttagacaattgattgttgctgtcaacaagatggactccgtcaartgggacaagaacagattygaggaaatcatcaaggaaacctctaacttcgtcaagaaggttggttacaaccctaagactgtgccattcgttcctatctctggatggaayggtgacaacatgattgaggcttctaccaactgtccttggtacaagggatgggagaaggagaccaaggctggtaagtccaccggtaagactttgttggaggccattgacgccattgagccacctcaaagaccaaccgacaagccattgagattgccattgcaagatgtytacaagattggtggtattggaacggtgccagtcggtagagttgaaaccggtatcatyaaggccggtatggttgttacctttgccccagctggtgtyaccactgaagtcaagtccgtggaaatgcaccacgaacaattggttgaaggtgttccaggtgacaatgttggtttcaacgttaagaacgtttccgttaaggaaattagaagaggtaacgtttgtggtgactccaagaacgacccaccaaagggttgtgactctttcaccgctcaagttattgtgttgaaccaccctggtcaaatctctgctggttactctccagttttggactgtcacaccgcccacattgcttgtaaattcgacaccttgttggagaagattgacagaagaaccggtaagaagatggaggacaaccccaagtttgtcaagtccggtgacgcttctatcgtcaagatggtgccatccaagccaatgtgtgttgaggctttcaccgactacccaccattgggaagattcgccgtcagagac

SEQ ID NO: 419 - DNA, 751 bp, Candida haemulonii ATCC 22991
tctgtcaagtgggacaaggccagatacgaggaaatcgtcaaggagacctctaacttcgtcaagaaggttggttacaaccctaagactgttccattcgtcccaatctctggttggaacggtgacaacatgattgaggcttctaccaactgtgactggtacaagggttgggagaaggagaccaagtctggtaagtccaccggtaagaccttgttggaggccattgacgccattgagccaccaaccagaccaaccgacaagccattgagattgccattgcaggatgtctacaagattggtggtatcggaactgtgccagtcggcagagttgagaccggtgttatcaaggccggtatggttgtcaccttcgccccagctggtgtcaccactgaagtcaagtctgtcgagatgcaccacgagcagttgccagagggtgtcccaggtgacaacgttggtttcaacgtcaagaacgtttccgttaaggaaatcagaagaggtaacgtctgtggtgactccaagcaggacccaccaaagggctgtgactctttcaccgctcaggttattgtgttgaaccacccaggtcagatctcttctggttactctccagttttggactgtcacactgcccacattgcttgtaagttcgacaccttggttgagaagatcgacagaagaaccggtaagaagttggaagatgagccaaagttcatcaagtccggtgacgctgctatcgtcaagatggtcccaaccaagc

SEQ ID NO: 420 - DNA, 1102 bp, Candida inconspicua ATCC 16783
tcttgacaagttaaaggctgaaagagaaagaggtatcactattgatattgctttatggaaattcgaaactccaaagtatcacgttaccgtcattgatgctccaggtcacagagatttcattaagaacatgattactggtacttctcaagcagattgtgctattttgattattgctggtggtgtcggtgaattcgaagctggtatttccaaggatggtcaaactagagaacacgctttattagcattcaccttaggtgttaagcaattgattgttgctatcaacaagatggattctgttaagtgggatgaaaagagatttgaagaaattgtcaaggaaacccaaaacttcatcaagaaggttggttacaacccaaagactgttccattcgttccaatttctggttggaatggtgacaacatgattgaaccatcttctaactgtccatggtacaagggttggactaaggaaaccaaggcaggtgttgtcaagggtaagaccttattagaagctattgatgctattgaaccacctgtcagaccaactgataagccattaagattaccattacaagatgtttacaagattggtggtattggtactgtgccagtcggtagagttgaaaccggtattattaagccaggtatggttgttgttttcgcaccatctggtgttaccactgaagtcaagtccgttgaaatgcaccatgaacaattagaagaaggtgtcccaggtgacaatgttggtttcaacgtcaagaacgtctctgttaaggatatcaagagaggtaacgtttgtggtgactccaagaatgacccaccacaaggttgtgcttccttcaatgctcaagtcattgtcttgaaccaccctggtcaaatttctgctggttactctccagttttagattgtcacactgcccacattgcatgtaaattcgatgaattaattgaaaagattgacagaagaactggtaagtccgttgaagaccatccaaagtctgttaagtctggtgatgcagctatcgttaagatggttccaaccaagccaatgtgtgttgaagctttcactgaatacccaccattaggtagattcgcagtcagagat

SEQ ID NO: 421 - DNA, 1099 bp, Candida kefyr ATCC 28838
tggacaagttaaaggctgaaagagaaagaggtatcaccatcgatatcgctttgtggaagttcgaaactccaaagtaccaagttaccgttatcgatgctccaggtcacagagatttcatcaagaacatgattactggtacttctcaagctgactgtgctatcttgattattgctggtggtgtcggtgaattcgaagccggtatctccaaggatggtcaaaccagagaacacgctttgttggcttacaccttgggtgttagacaattgattgttgctatcaacaagatggactctgttaagtgggatgaatctcgttaccaagaaattgttaaggaaacctccaacttcatcaagaaggtcggttacaacccaaagaatgttccattcgtcccaatctctggttggaacggtgacaacatgattgaagccaccaccaacgctccatggtacaagggttgggaaaaggaaaccaaggctggtaccgtcaagggtaagaccttgttggaagctattgacgctatcgaaccaccaaccagaccaactgacaagccattgagattgccattgcaagatgtctacaagatcggtggtattggtactgtgccagtcggtagagtcgaaaccggtgtcatcaagccaggtatggttgttaccttcgccccagccggtgtcactaccgaagttaagtccgtcgaaatgcaccacgaacaattggaagaaggtctaccaggtgacaacgtcggtttcaacgtcaagaacgtttccgttaaggaaatcagaagaggtaacgtctgtggtgactccaagaacgatccaccaaaggctgctgcttctttcaacgccactgttatcgtcttgaaccacccaggtcaaatctctgctggttactctccagttttggattgtcacactgctcacattgcttgtaagttcgacgaattgttggaaaagaacgacagaagatccggtaagaagttggaagactctccaaagttcttgaagtctggtgacgctgctttggttaagttcgttccatctaagccaatgtgtgttgaagcattctctgactacccaccattgggtagattcgctgtcagaga

SEQ ID NO: 422 - DNA, 1095 bp, Candida krusei ATCC 34135
aagttaaaggcagaaagagaaagaggtatcactattgatattgctttatggaagttygaaactccaaartaccacgttaccgttattgatgctccaggtcacagagatttcatcaagaacatgattaccggtacttctcaagctgattgtgctattttgattattgctggtggtgtcggtgaattcgaagctggtatctccaaggatggtcaaactagagaacacgctctattggctttcaccttaggtgttagacaattgattgttgctatcaacaagatggattccgttaartgggatgaaaacagatttgaagaaattgtcaaggaaacccaaaacttcatcaagaaggttggttacaacccaaagactgttccattcgttccaatytctggttggaatggtgacaacatgattgaagcatccaccaactgtccatggtacaagggttggactaaggaaaccaaggcaggtgttgttaagggtaagaccttattagaagcaatcgatgctattgaaccacctgtcagaccaaccgaaaagccattaagattaccattacaagatgtttacaagattggtggtattggtactgtgccagtcggtagagtcgaaaccggtgtcattaagccaggtatggttgtcacttttgctccagcaggtgtcaccaccgaagtcaagtccgttgaaatgcaccatgaacaattagaacaaggtgttccaggtgataacgttggtttcaacgttaagaacgtttctgtcaaggatatcaagagaggtaacgtttgtggtgactccaagaacgacccaccaatgggtgcagcttccttcaatgctcaagtcattgtcttgaaccaccctggtcaaatttccgctggttactctccagtcttggattgtcacactgcccacattgcatgtaagttcgacgaattaatcgaaaagattgacagaagaactggtaagtctgttgaagaccatccaaagtcygtcaagtctggtgatgcagctatcgtcaagatggtcccaaccaagccaatgtgtgttgaagctttcactgaatayccaccattaggtagattcgcagtcagagat

SEQ ID NO: 423 - DNA, 1104 bp, Candida lambica ATCC 24750
cttggacaagcttaaggctgaaagagaaagaggtatcaccattgatatcgctttatggaagttcgaaactccaaagtaccacgttaccgtcattgacgctccaggtcacagagatttcatcaagaacatgattactggtacctctcaagcagattgtgctattttratyattgctggtggtgtcggtgaattcgaagctggtatctctaaggatggtcaaaccagagaacacgctcttcttgcattcactcttggtgttagacaattgattgttgctatcaacaagatggactctgtcaagtgggacgaatccagattcgatgaaatttgtaaggaaaccgcwaacttcatcaagaaggttggttacaacccaaagactgttccattcgtcccaatctctggttggaacggtgacaacatgattgaaccatctgctaactgtccatggtacaagggatggactaaggaaaccaaggcttccggtgtcgtcaagggtaagacccttcttgaagcaattgatgctattgagccacctgtcagaccaactgacaaggctttgagattgccattrcaagatgtctacaagattggtggtattggtactgtgccagtcggtagagttgaaaccggtatcatcaagccaggtatgattgtcgttttcgctccaaccggtgttactactgaagttaagtccgttgaaatgcaccatgaacaattagaagaaggtgtcccaggtgacaatgttggtttcaacgtcaagaacgtctctgttaaggatattaagagaggtaacgtctgtggtgactccaagaacgacccaccaatgggttgtgcttccttcaatgctcaagtcattgttcttaaccacccaggtcaaatttctgctggttactcaccagttcttgactgtcacactgcccacattgcatgtaagttcgaygaattactcgaaaagattgacagaagaaccggtaaggctactgaagaccatccaaagtctgtcaagtctggtgatgcagctatcgtcaagatggttccaaccaagccaatgtgtgtygaagctttcactgactacccaccattaggtagattcgctgtyagaga

SEQ ID NO: 424 - DNA, 1098 bp, Candida lusitaniae ATCC 66035
ggacaagttgaaggctgagagagaaagaggtatcaccatcgatatcgctttgtggaagttcgagactccaaagtaccacgttaccgtcattgacgctccaggtcacagagatttcatcaagaacatgatcactggtacttcccaagctgactgtgctatcttgattatcgctggtggtgtcggtgagttcgaagccggtatctctaaggacggtcaaaccagagagcacgctttgttggcttacaccttgggtgtcaagcagttgattgttgctgtcaacaagatggactccgtcaagtgggaccaatctagattcgaggaaatcatcaaggaaacctctaacttcgtcaagaaggttggttacaaccctaagactgttccattcgtcccaatctctggttggaacggtgacaacatgattgagccatcyaccaactgcccatggtacaagggttgggagaaggagaccaagtcyggtaagtccaccggtaagaccttgttggaggccattgacgccattgagccaccttcgagaccaaccgacaagccattgagattgccattgcaagatgtctacaagatyggtggtattggtactgtgccagtcggtagagttgagaccggtgtcatcaaggccggtatggttgtcacctttgctccagctggtgtcaccactgaagtcaagtccgtggaaatgcaccacgaacaattggctgagggtgtcccaggtgacaacgttggtttcaacgtcaagaacgtttccgtcaaggaaatcagaagaggtaacgtctgtggtgactccaagaacgacccaccaaaggctgctgcttcyttcactgctcaagtyatygtcttgaaccacccaggtcaaatctcctcyggttactctccagtyttggactgtcacactgcycacattgcttgtaagttcgacaccttgattgagaagatcgacagaagaacyggtaagaagttggaagaagagccaaagttcatcaagtcyggtgacgctgctatcgtcaagatggtcccaaccaagccaatgtgygtygaagctttcaccgactacccaccattgggtagattcgctgtcagaga

SEQ ID NO: 425 - DNA, 1101 bp, Candida norvegensis ATCC 22977
tcttgacaagttaaaggctgaaagagaaagaggtatcactattgatattgctttatggaaattcgaaactccaaaataccacgttaccgttattgatgctccaggtcacagagatttcattaagaacatgattactggtacttcccaagctgattgtgctatcttaattattgctggtggtgtcggtgaattcgaagctggtatctccaaggatggtcaaaccagagaacacgctttattagcattcaccttaggtgttaagcaattaattgttgctatcaacaagatggactctgttaagtgggatgaaaagagatttgaagaaattgtcaaggaaacccaaaacttcatcaagaaggttggttacaacccaaagactgttccattcgttccaatttctggttggaatggtgacaacatgattgaaccatctactaactgtccatggtacaagggttggactaaggaaaccaaggcaggtgttgttaagggtaagaccttattagaagctattgatgctattgaaccacctgtcagaccaactgacaagccattaagattaccattacaagatgtttacaagattggtggtattggtactgtgccagtcggtagagttgaaaccggtgttattaagccaggtatggttgttgttttcgcaccatctggtgttaccactgaagtcaagtccgttgaaatgcaccatgaacaattagaacaaggtgtcccaggtgacaatgttggtttcaacgtcaagaacgtctctgttaaggatattaagagaggtaacgtttgtggtgactccaagaacgacccaccacaaggttgtgcttccttcaatgctcaagtcattgtcttgaaccaccctggtcaaatttctgcaggttactctccagttttagattgtcacactgcccacattgcatgtaagttcgatgaattaatcgaaaagattgacagaagaactggtaagtccgttgaagaccatccaaagtctgttaagtctggtgatgcagctatcgttaagatggttccaaccaagccaatgtgtgttgaagctttcactgaatacccaccattaggtagattcgcagtcagaga

SEQ ID NO: 426 - DNA, 1095 bp, Candida parapsilosis ATCC 90018
caaattgaaggctgaaagagaaagaggtatcaccattgatatcgctttgtggaaattcgaaactccaaaataccatgttactgttattgatgctccaggtcacagagatttcatcaagaatatgattactggtacttctcaagctgattgtgctattttgattattgctggtggtactggtgaattcgaagctggtatctctaaggatggtcaaaccagagaacacgctttgttggcttacaccttgggtgttaagcaattgattgttgccatcaacaagatggactcagtcaaatgggacaagaacagatacgaagaaattgtcaaggaaacttccaacttcgtcaagaaggttggttacaaccctaaagctgtcccattcgtcccaatctctggttggaacggtgacaatatgattgaaccatcaaccaactgtccatggtacaagggttgggaaaaggaaactaaagctggtaaggttaccggtaagaccttgttggaagctatcgatgctatcgaaccaccaaccagaccaactgacaagccattgagattgccattgcaagatgtctacaagattggtggtattggaactgtgccagttggtagagttgaaaccggtatcatcaaggctggtatggttgttacttttgccccagctggtgttaccactgaagtcaagtccgttgaaatgcaccacgaacaattgactgaaggtgtcccaggtgacaatgttggtttcaacgtcaagaacgtttcagttaaggaaatcagaagaggtaacgtttgtggtgactccaagaacgatccaccaaagggatgtgaytccttcaatgctcaagttattgtcttgaaccacccaggtcaaatctctgctggttactcaccagtcttggattgtcacactgcccacattgcttgtaaattcgacactttgattgaaaagattgacagaagaaccggtaagaaattggaagatgaaccaaaattcatcaagtccggtgatgctgcyatcgtcaagatggtcccaaccaagccaatgtgtgttgaagctttcactgactacccaccattgggaagattcgctgttagaga

SEQ ID NO: 427 - DNA, 752 bp, Candida rugosa ATCC 96275
ctccgtcaagtggtctcagtctcgtttcgaggagatcgtcaaggaggtttccaacttcatcaagaaggttggttacaagcccgatgaggttcctttcgtccccatctctggctggaacggcgacaacatgcttgagccctccaccaactgcccctggtacaagggatggaccaagaagaccaagaagggtgaggtcaagggtaagactcttctcgaggccattgacgccatcgagcccccctcccgtcctaccgacaagcccctccgcttgcctcttcaggatgtctacaagatcggcggtatcggtacggtacctgtcggccgtgtcgagaccggtatcatcaagcccggcatggtcgtcactttcgcccccgctggtgtcaccactgaagtgaagtccgtcgagatgcaccacgagcagatccccgagggtctccccggtgacaacgtcggtttcaacgtcaagaacgttaccgtcaaggatatccgccgtggtaacgtctgcggtgactccaagaacgacccccccaagggctgctcttccttcactgcccaggtcatcgttttcaaccaccccggtcagatctccaacggttactcccccgttttggactgccacaccgcccacattgcctgccgcttcgacgagatccagtccaagatggaccgtcgtactggtaagacccttgaggagaaccccaagttcatcaaggctggtgactccgctatcgtcaagatggttccctccaagc

SEQ ID NO: 428 - DNA, 1093 bp, Candida sphaerica ATCC 2504
agttaaaggctgaaagagaaagaggtatcaccatcgatatcgctttgtggaagttcgaaactccaaagtaccaagttaccgttatcgatgctccaggtcacagagatttcatcaagaacatgattactggtacttctcaagctgactgtgctatcttgattattgctggtggtgtcggtgaattcgaagccggtatctccaaggatggtcaaaccagagaacacgctttgttggctttcaccttgggtgttagacaattgattgttgctgttaacaagatggattccgttaagtgggatgaatctcgtttccaagaaattgtcaaggaaacctctaacttcatcaagaaggtcggttacaacccaaagactgttccattcgtcccaatctctggttggaacggtgacaacatgattgaagccaccaccaatgcttcatggtacaagggttgggaaaaggaaaccaagtccggtgtcgtcaagggtaagaccttgttggaagctattgacgctatcgaaccaccatccagaccaactgacaagccattgagattgccattgcaagatgtctacaagattggtggtatcggaactgtgccagtcggtagagtcgaaaccggtgttatcaagccaggtatgattgttacctttgccccagccggtgttactactgaagttaagtccgtcgaaatgcaccacgaacaattggaagaaggtctaccaggtgacaacgtcggtttcaacgtcaagaacgtttccgttaaggaaatcagaagaggtaacgtctgtggtgactccaagaacgatccaccaaaggctgctgcttctttcaacgccactgttatcgtcttgaaccatccaggtcaaatctctgctggttactctccagttttggattgtcacactgctcacattgcttgtaagttcgacgaattgttggaaaagaacgatagaagatccggtaagaagttggaagactctccaaagttcttgaagtccggtgatgctgctttggttaagttcgttccatctaagccaatgtgtgttgaagccttctctgactacccacctctaggtagattcgctgtcagaga

SEQ ID NO: 429 - DNA, 1094 bp, Candida tropicalis ATCC 13803
aaattgaaggctgaaagagaaagaggtatcaccattgatatcgctttgtggaaattcgaaactccaaaataccacgttaccgttattgatgctccaggtcacagagatttcatcaagaacatgattactggtacttcccaagctgattgtgctattttgattattgctggtggtactggtgaattcgaagctggtatttctaaagatggtcaaaccagagaacacgctttgttggcttacaccttgggtgtcaaacaattgattgttgctgtcaacaagatggactctgttaaatgggacaaaaacagatttgaagaaattatcaaggaaacttctaacttcgtcaagaaggttggttacaaccctaaggctgttccattcgttccaatctctggttggaatggtgacaacatgattgaagcttctaccaactgtccatggtacaagggttgggaaaaagaaaccaaggctggtaaggttaccggtaagactttgttggaagccattgatgctattgaaccaccttcaagaccaactgacaagccattgagattgccattgcaagatgtttacaagattggtggtattggtactgtgccagtcggtagagttgaaactggtgtcatcaaagccggtatggttgttactttcgccccagctggtgttaccactgaagtcaaatccgtcgaaatgcaccacgaacaattggctgaaggtgtcccaggtgacaatgttggtttcaacgttaagaacgtttctgttaaagaaattagaagaggtaacgtttgtggtgactccaagaacgatccaccaaagggttgtgactctttcaacgctcaagttattgtcttgaaccacccaggtcaaatctctgctggttactctccagtcttggattgtcacactgctcatattgcttgtaaattcgacaccttggttgaaaagattgacagaagaactggtaagaaattggaagaaaatccaaaattcgtcaaatccggtgatgctgctattgtcaagatggttccaaccaaaccaatgtgtgttgaagctttcactgactacccaccattaggtagattcgctgtcagaga

SEQ ID NO: 430 - DNA, 1095 bp, Candida utilis strain Csp 388
caagcttaaagctgagagagagagaggtatcactatcgacattgctctctggaagttcgagactccaaagtaccacgttactgtcattgatgccccaggtcacagagatttcatcaagaacatgattactggtacctcccaggctgactgtgctattcttatcattgccggtggtgttggtgagttcgaggctggtatctctaaggatggtcagaccagagagcacgctttgctcgctttcacccttggtgttagacagatgattgttgctatcaacaagatggactctgtcaagtgggacgagaagagattcgaggagatcgttaaggagacctctaacttcatcaagaaggttggttacaacccaaagactgttccatttgtcccaatttcyggttggaacggtgacaacatgattgaggcctctaccaactgtccatggtacaagggttgggagaaggagaccaaggctggtgttgtcaagggtaagaccttgctcgatgccattgacgccattgagccaccaacaagaccaactgacaagccattgagattgccactccaggatgtctacaagattggtggtatcggaactgttccagtcggtagagtcgagaccggtgtcatcaagccaggtatggttgttacctttgccccatccggtgtcaccactgaggttaagtccgtcgagatgcaccacgagcagcttgctgagggtatcccaggtgacaacgttggtttcaacgttaagaacgtctctgttaaggagatcagaagaggtaacgttgccggtgactccaagaacgacccaccacagggtgctgagtccttcaacgctcaggtcattgtcttgaaccacccaggtcagatctctgctggttactctccagttttggactgtcacaccgcccacattgcttgtaagttctctgagcttttggagaagattgacagaagatccggtaagtcccttgaggcctctccaaagttcgtcaagtctggtgatgccgctatcgtcaagatggttccatccaagccattgtgtgttgaggccttcactgactacccaccactcggtagattcgctgtcagaga

SEQ ID NO: 431 - DNA, 1085 bp, Candida viswanathii ATCC 28269
gctgaaagagaaagaggtatcaccatcgatatcgctttgtggaaattcgaaactccaaartaccacgttaccgtcattgaygctccaggtcacagagatttcatcaagaacatgatyactggtacttctcaagctgattgtgctatyttgattatcgctggtggtactggtgaattcgaagctggtatytctaaggatggtcaaaccagagaacacgctttgttggcctacaccttgggtgtcaagcaattgattgttgctgtcaacaagatggactctgtcaaatgggacaagaacagattcgaagaaatcatcaaggaaacctccaacttcgtcaagaaggttggttacaacccaaagactgttccattcgtcccaatctctggttggaacggtgacaacatgattgaagcctccaccaactgcccatggtacaagggttgggaaaaggaaaccaaggctggtaaggttaccggtaagactttgttggaagccattgacgctatcgaaccaccaaccagaccaactgacaagccattgagattgccattgcaagatgtctacaagattggtggtatcggaactgtgccagtcggtagagttgaaactggtgtcatcaaggccggtatggttgtcactttygccccagctggtgttaccactgaagtcaagtccgttgaaatgcaccacgaacaattggctgaaggtgtcccaggtgacaacgttggtttcaacgtcaagaacgtttccgtcaaggaaatcagaagaggtaacgtctgtggtgactccaagaacgacccaccaaagggttgtgastctttcaacgctcaagtcattgtcttgaaccacccaggtcaaatctctgctggttactctccagtcttggattgtcacactgcccacattgcttgtaagtttgacaccttggttgaaaagattgacagaagaaccggtaagaagttggaagaaaacccaaagtttgtcaagtccggtgacgctgctatcgtcaagatggtcccaaccaagccaatgtgtgttgaagcyttcactgactacccaccattgggtagattcgctgtcagaga

SEQ ID NO: 432 - DNA, 1072 bp, Candida zeylanoides ATCC 7351
aggtattaccattgacattgccttgtggaagttcgagacccccaagtaccaggtcaccgtcattgacgctcctggccacagagatttcattaagaacatgatcactggtacctcccaggctgactgtgccatcttgatcattgctggtggtgttggtgagttcgaggctggtatctccaaggatggccagaccagagagcacgccttgcttgcctacaccttgggtgtcaagcaattgattgttgctgtcaacaagatggactccgtcaagtgggacaagaacagattcgaggagattgtcaaggagacctccaacttcgtcaagaaggttggctacaaccccaagactgtccccttcgttcccatctccggttggaacggtgacaacatgattgaggcctccaccaactgcccttggtacaagggttgggagaaggagaccaaggccggtaaggtcactggtaagaccttgttggaggctattgacgccattgagccccccaccagacccaccgacaagcccttgagattgcccttgcaggatgtctacaagattggtggtattggaacggtgcccgttggcagagttgagaccggcatcatcaaggccggtatggttgtcacctttgcccccgctggtgtcactactgaagtgaagtctgtcgagatgcaccacgagcaattggctgagggtgtcccaggtgacaatgttggtttcaacgtgaagaacgtttccgttaaggagatcagaagaggtaacgtttgcggtgactccaagaacgacccccccaaggctgctgcttctttcaacgcccaggttatcgtcttaaaccaccccggtcaaatctctgctggttactctccggttttggattgccacactgcccacattgcttgcagattcgaccagttgattgagaagatcgacagaagaaccggtaagaagatggaggacgaccctaagttcatcaagtccggtgacgctgccatcgtcaagatggttccttccaagcccatgtgtgttgaggccttcactgactaccctcccttgggtcgtttcgctgtcagagac

SEQ ID NO: 433 - DNA, 751 bp, Coccidioides immitis strain Silveira
agcaccaactggtccgagcctcgtttcaacgaaatcgtcaaggaagtctccaacttcatcaagaaggtcggatacaaccccaaggctgttccattcgtccccatctctggtttcgaaggtgacaacatgattcaaccctccaccaacgctccttggtacaagggctggaacaaggagaccgcctctggcaagcacactggcaagaccctcctcgacgccattgatgccatcgaccccccaacccgccccaccgagaagcccctccgtctcccacttcaggatgtgtacaagatctctggtatcggaacagtcccagtcggccgtgtcgaaaccggtgttatcaagcctggtatggttgtgaccttcgctccttccaacgtcaccactgaagtcaagtccgtcgaaatgcaccaccagcagctcacccagggtaaccctggtgacaacgttggcttcaacgtcaagaacgtctctgtcaaggaagtccgccgcggtaacgtcgctggtgactccaagaacgacccaccaaagggctgcgactccttcaacgcccaggtcatcgtcctcaaccaccctggtcaagtcggtgctggttatgccccagtccttgactgccacactgcccacattgcttgcaagttctccgagctcctcgagaagatcgaccgccgtaccggtaaatccgttgagaacaaccccaagttcatcaagtctggtgatgccgctatcgtcaagatggttccatccaagc

SEQ ID NO: 434 - DNA, 1146 bp, Cryptococcus albidus ATCC 66030
aagctcaaggccgagcgagagcgaggtatcaccatcgacatcgccttgtggaagttcgagacccccaagtacaatgtcaccgtcattgacgcccccggtcaccgagacttcatcaagaacatgatcaccggtacctcgcaggccgactgtgccatcctcatcatcgcctccggtatcggagagttcgaggctggtatctccaaggacggtcagacccgagagcacgcccttttggccttcaccctcggtgtccgacagctcatcattgccatcaacaagatggacacctgcaaggttagttcgcaggtcctggtctctgtacgaatcttgctgaccccttttacagtggtccgaagaccgatacaacgaaatcgtcaaggaggcttccggtttcatcaagaaggtcggatacaaccccaagaccgttcccttcgtccccatctccggatggcacggagacaacatgttggaggagtccaccaacatgccctggtacaagggatggcacaaggagtccaaggccggtgttgtcaagggaaagaccttgctcgaggccatcgacgccatcgagccccctacccgaccttccgacaagcccttgcgattgcccctccaggatgtctacaagatcggtggtatcggtacggtgcccgtcggtcgagtcgagaccggtgtcatcaaggctggtatggtcgtcaccttcgcccctgccaacgtcaccaccgaagtcaagtccgtcgaaatgcaccacgaacagctcgctgagggtgttcccggtgacaacgtcggtttcaacgtcaagaacgtttccgtcaaggacatccgacgaggaaacgtctgctccgactcgaagaacgaccccgctatggagtctgcttccttcaacgctcaggtcattgtcttgaaccacccgggtcagatcggtgccggctactcccccgttttggactgccacaccgctcacattgcctgcaagttcgctgagctcgttgagaagatcgaccgacgaaccggtaaggtcatggaggccgcccccaagttcgtcaagtccggtgacgccgccatcgtcaagttgatcccgtccaagcccatgtgtgtcgagtcctactccgagtacccccccttgggtcgattcgccgtccgaga

SEQ ID NO: 435 - DNA, 1095 bp, Exophiala jeanselmei ATCC 64755
caagctgaaggccgagcgtgagcgtggtatcaccatcgatatcgccttgtggaagttcgagactcccaagtactatgtcactgtcatcgacgcccctggtcatcgtgactttatcaagaacatgatcactggtacttcccaggctgactgcgccattctcatcattgccgccggtactggtgaattcgaagccggtatctccaaggatggtcagactcgtgagcacgctctgctcgcctacaccctgggtgtcaagcagctcattgtcgccatcaacaagatggacaccaccaagtggtccgaggatcgtttcaacgaaatcatcaaggagacttccagcttcatcaagaaggtcggctacaaccccaagtccgttcctttcgtccccatctccggcttcaacggtgacaacatgatcgatgtctccaccaactgcccctggtacaagggctgggagaaggagaccaaggctggcaaggcctctggcaagactctcctcgaggccatcgacgccatcgacccccccactcgtcccaccgacaagcctctccgtcttcctctccaggatgtctacaagatctctggtatcggaacggtgcccgtcggtcgtgttgagactggtgtcatcaaggccggtatggtcgttaccttcgctcctgccaacgtcaccactgaagtcaagtccgtcgaaatgcaccacgaacaactcgccgagggtgttccaggtgacaacgttggtttcaacgtcaagaacgtctccgtcaaggaggttcgtcgtggaaacgtctgcggtgactccaagaacgacccacccaagggtgctgattccttcaacgcccaggtcatcgtcttgaaccaccctggtcaagtcggtgctggctacgccccagtgttggattgccacactgcccacattgcttgcaagttctctgagcttctcgagaagattgaccgccgtaccggtaaatccatcgaaaacaaccccaagttcatcaagtctggtgacgctgccatcgtcaagatggttcccagcaagcccatgtgtgttgaggccttcactgactacccacctcttggtcgtttcgccgtccgtga

SEQ ID NO: 436 - DNA, 1113 bp, Fusarium oxysporum strain WSA-212
aagctcaaggccgagcgtgagcgtggtatcaccatcgatattgctctctggaagttcgagactcctcgctactatgtcaccgtcattggtatgttgtcgctcatgcttcattctacttctcttcgtactaacacatcactcagacgctcccggtcaccgtgatttcatcaagaacatgatcactggtacttcccaggccgattgcgccattctcatcattgccgccggtactggtgagttcgaggctggtatctccaaggatggccagacccgtgagcacgctcttcttgcctacacccttggtgtcaagaacctcatcgtcgccatcaacaagatggacaccaccaagtggtctgaggcccgttaccaggagatcatcaaggagacctcctctttcatcaagaaggtcggctacaaccccaaggctgtcgctttcgtccccatctccggtttcaacggtgacaacatgcttaccccctccaccaactgcccctggtacaagggttgggagcgtgagatcaagtccggcaagctcactggcaagaccctcctcgaggccattgactccatcgagccccccaagcgtcccgttgacaagccccttcgtcttccccttcaggatgtctacaagatcggtggtattggaacggttcccgtcggccgtatcgagactggtgtcatcaagcccggtatggtcgttaccttcgctccttccaacgtcaccactgaagtcaagtccgtcgagatgcaccacgagcaactcactgagggccagcccggtgacaacgttggtttcaacgtgaagaacgtctccgtcaaggacatccgacgtggtaacgtcgctggtgactccaagaacgacccccctatgggtgccgcttctttcaccgcccaggtcatcgtcctcaaccaccccggtcaggtcggtgctggttacgctcccgtcctcgattgtcacactgcccacattgcctgcaagttcgccgagatccaggagaagatcgaccgccgaaccggtaaggctactgaggccgcccccaagttcatcaagtctggtgactccgccatcgtcaagatggttccctccaagcccatgtgtgttgaggctttcac

SEQ ID NO: 437 - DNA, 726 bp, Geotrichum spp. strain LEV-4
ggtccgaggacagattcaacgagattgtcaaggagacttccaacttcatcaagaaggttggttayaaccccaagactgttgctttcgtccccatctctggttggaacggtgacaacatgattgagccctccaccaactgcccctggtacaagggatggcagaaggagaccaaggctggtgtcactaagggtaagaccctccttgaggccatcgatgccattgagccccctgtcagaccttccgacaagcccctccgtcttcccctccaggatgtctacaagatcggtggtatcggaactgtgcccgtcggccgtgtcgaaaccggtgtcatcaaggccggtatggtcgtcaccttcgcccccgctggtgtcaccactgaagtcaagtccgtcgagatgcaccacgagctcctcactgagggtctccccggtgacaacgttggtttcaacgtcaagaacgtctccgttaaggatatcagacgtggtaacgtctgcggtgactccaagaacgatccccccaaggcttgcgcttctttcaacgcccaggtcattatcttcaaccaccctggtcagatctctgctggatactctcccgtccttgattgccacaccgcccatattgcttgcaagttcgacactttgatcgagaagattgaccgtcgtactggtaagaagactgaggactcccccaagttcgtcaaggccggtgatgctgctatcgtcaaga

SEQ ID NO: 438 - DNA, 754 bp, Histoplasma capsulatum strain G186A5
caccaccaagtggtccgagtcccgtttcaacgaaatcatcaaggaggtttccaacttcatcaagaaggtcggatataaccccaaggctgttcccttcgtgccaatctctggtttcgagggtgacaacatgattgaaccctcccccaactgcacatggtacaagggctggaacaaggagactgcctctggcaagtcttctggtaaaacccttctcgatgccattgacgccattgaacccccaacccgtcctaccgataagcccctccgtcttcccctccaggatgtgtacaaaatctctggtattggcactgttcccgtcggacgtgttgagactggtgtcatcaagcccggtatggtcgtgactttcgctccctccaacgtcaccactgaagtcaagtccgtcgaaatgcaccaccaacaactccaggctggttaccctggcgacaacgtcggcttcaacgtcaagaacgtttcagtcaaggaagtccgccgtggcaacgttgctggcgactccaaaaatgatccccctaagggctgcgaatccttcaatgcccaggtcatcgtccttaaccaccccggccaggttggcgctggttatgccccagtcctcgactgccacactgcccacattgcttgcaagttctctgagcttattgagaagatcgaccgccgtaccggaaagtctgttgagaacaaccccaagttcatcaagtctggtgatgctgctatcgtcaagatggttccctccaagccc

SEQ ID NO: 439 - DNA, 743 bp, Issatchenkia orientalis ATCC 6258
tgggatgaaaacagatttgaagaaattgtcaaggaaacccaaaacttcatcaagaaggttggttacaacccaaagactgttccattcgttccaatctctggttggaatggtgacaacatgattgaagcatccaccaactgtccatggtacaagggttggactaaggaaaccaaggcaggtgttgttaagggtaagaccttattagaagcaatcgatgctattgaaccacctgtcagaccaaccgaaaagccattaagattaccattacaagatgtttacaagattggtggtattggtactgtgccagtcggtagagtcgaaaccggtgtcattaagccaggtatggttgtcacttttgctccagcaggtgtcaccaccgaagtcaartccgttgaaatgcaccatgaacaattagaacaaggtgttccaggtgataacgttggtttcaacgttaagaacgtctctgtcaaggatatcaagagaggtaacgtttgtggtgactccaagaacgacccaccaatgggtgcagcttcyttcaatgctcaagtcattgtcttgaaccaccctggtcaaatttccgctggttactctccagtcttggattgtcacactgcccacattgcatgtaagttcgacgaattaatcgaaaagattgacagaagaactggtaagtctgttgaagaccatccaaagtcygtcaagtctggtgatgcagctatcgtcaagatggtcccaaccaagcc

SEQ ID NO: 440 - DNA, 1091 bp, Malassezia furfur ATCC 42132
caagctcaaggctgagcgtgagcgtggtatcaccatcgacattgctctgtggaagttcgagacccctaagtaccacgttaccgtcattgacgctcctggtcaccgtgacttcatcaagaacatgattacgggtacctcgcaggctgactgcgctatcctcatcattgccggtggtaccggtgagttcgaggctggtatctcgaaggacggtcagacccgtgagcacgctctgctcgctttcaccctgggtgtgcgtcagctcattgtggccgtcaacaagatggacaccaccaagtactcggaggaccgcttcaacgagattgtccgcgaagtgtcgaacttcatcaagaaggtcggtttcaaccccaagactgttgccttcgtccccatctcgggctggcacggtgacaacatgatcgaggccaccaccaacatgccttggtacaagggctgggagaaggagaccaagtcgggcaaggtcactggtaagactctgctggacgccatcgacgccatcgagcccccgacccgccccactgacaagcccctgcgtctccctctgcaggatgtgtacaagatcggtggtatcggtactgtccctgtcggtcgtgttgagaccggtgtgatcaagcccggtatggttgtgaccttcgctccctcgaacgtcaccactgaagttaagtcggttgagatgcaccacgagtcgctccctgagggtctccccggtgacaacgttggtttcaacgtgaagaacgtctcggttaaggacattcgccgtggtaacgttgcctcggactcgaagaacgaccccgctcaggaggctgcttcgttcaacgcgcaggtcattgtcatgaaccaccctggtcagatcagcaacggttactcgcccgtgcttgactgccacactgcgcacattgcctgccgcttcaacaacatcctccagaagatcgaccgtcgctcgggtaaggtgcttgaggagaaccccaagttcatcaagtcgggtgacgctgccatggtggagatgatccccaccaagcccatgtgtgtggagtcgttcaacgagtacccccctctgggtcgtttcgctgtgc

SEQ ID NO: 441 - DNA, 749 bp, Malassezia pachydermatis ATCC 42756
accaccaagtactcggaggaccgcttcaacgagattattcgcgagacttcgaacttcatcaagaaggtcggttacaacccgaagactgttgccttcgtcccgatctcgggctggcacggtgacaacatgattgaggcgaccaccaacatgccgtggtacaagggctgggagaaggagaccaagtcgggcaaggccactggtaagacccttctggacgctattgacgccattgagccgccgacgcgcccgaccgacaagcctctccgtcttcctctccaggatgtgtacaagatcggtggtatcggtacygtcccggtcggccgtgttgagaccggtgttatcaagcccggtatggttgtgaccttcgctccgtcgaacgtcacsactgaagttaagtcggtcgagatgcaccacgagcagatccctgagggtcttccgggtgacaacgttggtttcaacgtgaagaacgtgtcggtcaaggacattcgccgtggtaacgtcgcctcggactcgaagaacgacccggctcaggaggctgcctcgttcaatgctcaggtcattgtgatgaaccaccctggtcagatcagcaacggttactcgccrgtgctcgactgccacactgctcacattgcctgccgcttcaacaacatcctccagaagatcgaccgtcgttcgggtaaggttctygaagagaaccccaagttcatcaagtcgggtgacgctgccatggttgagatgatcccgaccaa

SEQ ID NO: 442 - DNA, 1150 bp, Malbranchea filamentosa ATCC 48174
actgaaggccgagcgtgagcgtggtatcaccatcgatatcgccctctggaagttcgagacccccaagtaccatgtcaccgtcattggtacgttcgacatgttcgaccttttgcctagtgtccccttctaaccacagtttatagacgcccctggccatcgtgatttcgtcaagaacatgatcactggtacttcccaggctgattgcgctatcctcatcattgcttccggcactggtgaattcgaggctggtatctccaaggatggccagacccgtgagcacgctctgctttccttcaccctcggtgttaggcagctcattgtcgccctcaacaagatggacactgtcaacttcgctgaggcccgttacaacgagattgtcaaggaagtctccaacttcatcaagaaggtcggctacaaccccaaggccgttcctttcgtccccatctccggtttcgagggtgacaacatgatcgaggcctccacccgcattccttggtacaagggctggaacaaggagaccgccagtggcaagagcaccggcaagaccctyctcgaggccattgatgccatcgaacccccggtccgtcccaccgacaagcccctycgtctccctcttcaggatgtgtacaagatctccggtattggcactgttcctgtcggtcgtgttgagactggtgtcatcaagcctggtatggtcgttactttcgcccccgccaacgtcaccactgaagtcaagtccgtcgagatgcaccaccagcagctccaggccggtaaccccggtgacaacgtcggcttcaacgtcaagaacgtttccgtcaaggaagtccgccgtggcaacgttgcctccgactccaagaacgaccccgccaagggctgcgactccttcaacgcccaggtcatcgtccttaaccaccccggtcaggtcggtgctggatacgctcccgtcctcgattgccacactgcccacattgcttgcaagttctctgagcttcttgagaagatcgatcgccgtaccggtaaatccgttgaggaccaccccaagttcatcaagtctggtgatgccgctatcgtcaagatggttccctccaagcctatgtgcgttgaggctttcactgactaccctccccttggtcgtttcgccgtccgtgac

SEQ ID NO: 443 - DNA, 1099 bp, Metschnikowia pulcherrima DSM 70336
ggacaagttgaaggctgagagagagagaggtatcaccatcgacattgccttgtggaagttcgagactcctaagtaccacgtcaccgtyattgacgccccaggtcacagagatttcatcaagaacatgatcactggtacttcccaggctgactgtgcyatcttgattatcgcyggtggtgttggtgagttcgaggctggtatctccaaggatggccagaccagagagcacgctttgttggcytacaccttgggtgttagacarttgattgttgccgtcaacaagatggactctgtcaagtgggacaagaacagatttgaggagatcatcaaggagacctctaacttcgtcaagaaggttggttacaaccctaagacygtgccattcgtgccaatytctggttggaacggtgacaacatgattgaggcytccactaactgcccatggtacaagggttgggagaaggagaccaaggccggtaagtctwccggtaagaccttgttggaggccattgacgccattgagccaccaaccagacctaccgacaaggccttgagattgcctttgcaggatgtctacaagatcggtggtatcggaacggtgccagtcggccgtgtcgagaccggtgtcattaaggccggtatggttgtyaccttygccccagctggtgtcaccactgaggtcaagtccgtcgagatgcaccacgagcagttggtcgagggtcttccaggtgacaaygttggtttcaacgtcaagaacgtctccgttaaggagatcagaagaggtaacgtctgtggtgactccaagcaggacccaccaaagggtgccgcttctttcaccgcycaggttattgtgttgaaccaccctggtcagatctcctctggttactctccagtgttggactgycacaccgcccacattgcctgtaarttcgacaccttgttggagaagattgacagaagaactggtaagtccttggagtcygagcctaagttcgtcaagtcyggtgacgccgccattgtcaagatggtgccaaccaagccaatgtgtgttgaggctttcaccgactacccacctttgggtagattcgccgtcagagac

SEQ ID NO: 444 - DNA, 1153 bp, Paecilomyces lilacinus ATCC 42570
caagctcaaggccgagcgtgagcgtggtatcaccatcgacattgccctctggaagttcgagactcccaagtactatgtcaccgtcattggtacgtcgactcgcgcgagactggtcgcaatttccacgtcgctaacgtgcttgaacagacgctcccggccaccgtgacttcatcaagaacatgatcactggtacctcccaggctgactgcgctatcctcattatcgctgccggcactggtgagttcgaggctggtatctccaaggatggccagacccgtgagcacgctctgctcgcctacaccctcggtgttaagcagctcatcgtcgctatcaacaagatggacaccaccaagtggtctgaggcccgtttccaggagatcatcaaggagacctccaacttcatcaagaaggtcggctacaaccccaagaccgtcgctttcgtccccatctctggtttccacggcgacaacatgctttccccctccaccaactgcccctggtacaagggctgggagaaggagaccaaggctggcaagtccaccggcaagaccctccttgaggccatcgactccatcgagccccccaagcgccccagcgacaagcccctccgccttccccttcaggatgtgtacaagatcggcggtatcggcacagtccctgtcggccgtatcgagactggtgtcatcaagcccggcatggtcgtgaccttcgctccttccaacgtcaccaccgaagtcaagtccgttgagatgcaccacgagcagctctccgagggtgtccccggtgacaacgtcggcttcaacgtcaagaacgtctccgtcaaggagatccgtcgtggcaacgtcgccggtgactccaagaacgacccccctctgggtgccgcttctttcgatgcccaggtcatcgtcctcaaccaccccggccaggtcggtgctggctacgcccccgtcctcgactgccacaccgcccacattgcctgcaagttcgccgagatcaaggagaagatcgaccgccgtaccggcaagtctgtcgagtccgcccccaagttcatcaagtctggcgactctgccatcgtcaagatgattccctccaagcccatgtgcgttgaggctttcaccgactaccctcctctgggccgcttcgccgtccgtga

SEQ ID NO: 445 - DNA, 763 bp, Paracoccidioides brasiliensis ATCC 32071
taccactaagtggtccgagacccgattcaatgaaattatcaaggaagtcaccaatttcattaagaaggtcggatataaccccaagactgttcctttcgttcccatttctggtttcgagggtgacaacatgatcgagccctctgccaactgcccatggtacaagggctggtccaaggagactgctcagggcaagtactctggcaagacccttcttgaggccatcgacgccattgagccccccacccgtcctaccgataaacctctccgtcttcccctccaggatgtctacaagatctccggtattggcactgttcctgtcggacgtgttgagactggagtcatcaagcccggtatggtcgtgaccttcgctcccgccaacgtcaccactgaagtcaagtccgtcgaaatgcaccaccagcagcttaccgccggtaaccccggtgacaacgtcggcttcaacgtcaagaatgtttccgtcaaagaagtccgccgtggtaacgttgccggtgactctaagaatgatcccccaaagggctgcgattccttcaatgcccaggtcatcgtcctcaaccaccctggtcaggttggcgctggttatgccccagtcctcgactgccatactgcccacattgcctgcaaattcgctgagctccttgagaagattgatcgacgaaccggaaagtctgttgagaacaaccccaagttcatcaagtccggtgatgctgctatcgtcaagatgattccttccaagcccatgtgcgtc

SEQ ID NO: 446 - DNA, 1346 bp, Penicillium marneffei ATCC 64101
aagctcaaggctgagcgtgagcgtggtatcaccatcgatattgctctctggaagttccagactgccaagtacgaggttaccgtcattgacgcccccggtcaccgtgatttcatcaagaacatgatcactggtacctcccaggccgattgcgctattctcatcattgcctctggtactggtgaattcgaggctggtatctccaaggatggccagactcgtgagcacgctcttttggctttcaccctcggtgtccgtcagctcattgttgccctcaacaagatggacacttgcaagtggtctcagggtgagtactcgtacctgcgtttggccttgaatatcttactaatgcaccatagatcgttacaacgaaattgtcaaggagacttccaacttcatcaagaaggtcggatacaaccccaagaacgttcctttcgttcctatctccggtttcaacggtgacaacatgcttgagccctcccccaactgcccctggtacaagggttgggagaaggagaccaaggccggtaaggtcactggtaagaccctcctcgaggccatcgacgccattgagccccctacccgtcccgccaacaaggttagtccctcctcgactactcaaaccctcctcataagttcagattactgactcgttcacagcccctccgtcttcccctccagratgtctacaagatcggtggtattggaacggttcccgtcggtcgtgttgagactggtaccatcgttcctggtatggttgtcaccttgtaagtcactctcctcgcttatcctacctgaaatcatcatgtgctaacttgacactcagcgctcccgccaacgtcaccactgaagtcaagagtgttgaaatgcaccaccagcagctcactgccggtcagcccggtgacaacgttggtttcaacgtgaagaacgtctccgtcaaggaaatccgtcgtggtaacgttgctggtgacagcaagaacgacccccctgccggtgctgcctccttcaacgcccaggtcatcgtcctcaaccaccccggtcaggtcggtgctggttacgccccagtcctcgattgccacactgcccacattgcttgcaagttcgctgagctcctcgagaagattgaccgtcgtaccggaaagtctgttgaggaccaccccaagttcatcaagtccggtgacgctgccatcgtcaagatgattccttccaagcccatgtgtgttgaggctttcaccgagtaccctcctctcggtcgtttcgccgttcgcgagtaagttttatctccgttgtctattttccatccttcccttctcctccgtcttccatatatactttttcagttatatgtg

SEQ ID NO: 447 - DNA, 1094 bp, Pichia anomala ATCC 18205
  misc_feature (1)...(1094): n=a,t,c or g
aagttaaaagctgaacgtgaaagaggtatcactattgatattgctttatggaaattcgaaactccaaaataccatgttaccgttattgatgctccaggtcacagagatttcatcaaaaatatgattactggtacttcccaagctgattgtgctatyttaattattgccggtggtattggtgaattcgaagctggtatctcaaaagatggtcaaaccagagaacacgctttnttagcttacaccttaggtgttaaacaattgattgttgctatcaacaagatggattccgttaaatgggatgaatctcgtttcgaagaaattgtcaaggaaacytcaaactttatcaagaaagttggttacaacccaaaaactgttccattcgttccaatctcaggttggaatggtgataacatgattgaaccatcawctaactgtccatggtacaaaggttggaaaaaagaaaccaaagctggtgaagctaaaggtaaaactttattagaagccattgatgctattgacccaccatcaagaccaactgataaaccattacgtttaccattacaagatgtttacaarattggtggtattggtactgtgccagtcggtagagttgaaaccggtgttatcaaaccaggtatggttgttacctttgccccagctggtgttaccactgaagtcaaatctgttgaaatgcatcatgaacaattgactgaaggtttaccaggtgacaatgttggtttcaacgttaagaatgtttctgttaaagaaatccgtcgtggtaacgtctgtggtgactctaaaaacgatccaccaaaagctgctgaatcattcaatgctcaagttattgtcttaaaccatccaggtcaaatctctgctggttactctccagttttagattgtcacactgctcacattgcttgtaaatttgacactttaattgaaaaaattgacagacgtactggtaagaaattagaagaagctccaaaattcatcaaatcaggtgatgctgctattgttaaatttgttccatcaaaaccattatcagttgaagctttcactgactacccaccattaggtcgtttcgctgtcagaga

SEQ ID NO: 448 - DNA, 1100 bp, Pichia anomala ATCC 2149
cttagataagttaaaagctgaacgtgaaagaggtatcactattgatattgctttatggaaattcgaaactccaaaataccatgttaccgttattgatgctccaggtcacagagatttcatcaaaaatatgattactggtacttcccaagctgattgtgctatmttaattattgccggtggtattggtgaattcgaagctggtatctcaaaagatggtcaaaccagagaacacgctttrttagcttacaccttaggtgttaaacaattgattgttgctatcaacaagatggattccgttaaatgggatgaatctcgtttcgaagaaattgtcaaggaaacytcaaactttatcaagaaagttggtacaacccaaaaactgttccattcgttccaatctcaggttggaatggtgataacatgattgaaccatcaactaactgtccatggtacaaaggttggaaaaaagaaaccaaagctggtgaagctaaaggtaaaactttattagaagccattgatgctattgatccaccatcaagaccaactgataaaccattacgtttaccattacaagatgtttacaarattggtggtattggtactgtgccagtcggtagagttgaaaccggtgttatcaaaccaggtatggttgttacctttgccccagctggtgttaccactgaagtcaaatctgttgaaatgcatcatgaacaattgactgaaggtttaccaggtgacaatgttggtttcaacgttaagaatgtttctgttaaagaaatccgtcgtggtaacgtctgtggtgactctaaaaacgatccaccaaaagctgctgaatcattcaatgctcaagttattgtcttaaaccatccaggtcaaatctctgctggttactctccagttttagattgtcacactgctcacattgcttgtaaatttgacactttaattgaaaaaattgacagacgtactggtaagaaattagaagaagctccaaaattcatcaaatcaggtgatgctgctattgttaaatttgttccatcaaaaccattatcagttgaagctttcactgactacccaccattaggtcgtttcgctgtcagaga

SEQ ID NO: 449 - DNA, 1201 bp, Pseudallescheria boydii ATCC 44331
caagctcaaggccgagcgtgagcgtggtatcaccatcgatatcgccctctggaagttcgagacccccaagtaccaggtcaccgtcattggtatgtctttgtgctttttgtgctttttgtgcctgtgcctcgcacaattccagccctcgataattatgaacctcgtactaatatgtcgttctcccactacccacagacgcccccggccatcgtgatttcatcaagaacatgattactggtacctcccaggctgattgcgccattctcatcattgcctccggtactggtgagttcgaggctggcatctccaaggatggccagacccgtgagcacgctcttctcgccttcaccctcggtgtcaagaacctcattgttgccatcaacaagatggacaccaacaactggtccgaggaccgatacaaggagatcatcaaggagacctccaacttcatcaagaaggtcggctacaaccccaaggccgttcctttcgtccccatctccggtttccacggagacaacatgcttaccccctccaccaactgcccctggtacaagggttgggtccgtgaggtcaagggtaacacccttaccggcaagacccttctcgaggccatcgactycatcgagccccccaagcgtcccaccgagaagcccctccgtcttccccttcaggacgtctacaagatcggtggtattggcactgtgcccgtcggccgtatcgagaccggtatcctcaagcccggtatggtcgtcaccttcgctccctccaacgtcaccactgaagtcaagtccgtcgagatgcaccacgagcagcttaccgagggtgtccccggtgacaacgttggtttcaacgtgaagaacgtctccgtcaaggatatccgccgtggcaacgtctgcggtgactccaagaacgacccccccgctgctgccgcctctttccaggcccaggtcattgtcctcaaccaccccggccagatcggtgctggttacgctcccgttcttgactgccacactgcccacattgcttgcaagttcgccgagctccttgagaagatcgaccgccgtaccggtaagtcggtcgagaacaaccccaagttcgtcaagtctggtgatgccgccatcgtcaagatggttccctccaagcccatgtgtgttgagtccttcaccgagtacccccctctcggtcgtttcgccgtccgtga

SEQ ID NO: 450 - DNA, 1095 bp, Rhizopus oryzae ATCC 56015
caagcttaaggctgaacgtgaacgtggtatcaccatcgatattgctctctggaagttcgaaacccccaagtaccaaattaccgttattgatgctcccggtcaccgtgatttcatcaagaacatgattaccggtacttctcaagccgattgtgctattcttatcattgctggtggtactggtgaattcgaagctggtatctccaaggatggtcaaacccgtgaacacgcccttttggctttcactctcggtgtccgtcaattgattgttgctgtcaacaagatggataccaccaagtggtccgaagctcgtttcaacgaaatygtcaaggaagtttcttccttcatcaagaagattggttacaaccccaagtctgttcccttcgtccccatctctggttggcacggtgacaacatgttggaagaatctaccaacatgccctggtacaagggatggaacaaggaaaccaaggctggtgccaagtctggtaagaccctcttggatgccattgacaacattgaccctcctacccgtcctgttgacaagcctctccgtcttcctcttcaagatgtttacaagattggtggtatcggtactgtccccgtcggtcgtgtcgaaactggtgtcatcaaggctggtatggttgtcaccttcgctcctgctgctgtcaccactgaagttaagtccgtcgaaatgcaccacgaaaccctcactgaaggtctccccggtgacaacgtcggtttcaacgtcaagaacgtctccgtcaaggatatccgtcgtggtaacgtctgttctgactccaagaacgaccccgccaaggaagccggttccttcaccgctcaagtcattatcttgaaccaccctggtcaaattggtgctggttacgctccygttttggattgtcacactgctcacattgcctgtaagttcgctgaattgatcgaaaagattgacagacgttccggtaagtccttggaagctactcccaagttcgtcaagtctggtgactctgccatcgtcaagatgatcccctccaagcccatgtgtgttgaagcttacactgactaccctcctctcggtcgtttcgctgttcgtga

SEQ ID NO: 451 - DNA, 1292 bp, Rhodotorula minuta ATCC 10658
gctgaaggccgagcgagagcgtggtatcaccatcgatatcgctctatggaagttcgagacccccaagtacaacgtcaccgtcattgacgctccaggacatcgtgatttcatcaagagtgagttaaccataacatcaaacagtgttgcaaacatcagctaatgcatgttatgcgtccagacatgattactggtacttcccaggccgattgcgctattctcatcatcgccaccggtgttggtgagttcgaggctggtatctccaaggatggccagacccgagagcacgcccttctcgccttcaccctcggtgtcagacagctcatcgttgccttgaacaagatggactcggtcaaggtaggctaacttcacaacgtcggcttcccatcattcattcacttacctgtcttgtcttccaccctccagttctccgagtcccgatacgatgaaatcgtcaaggagacatccggtttcatcaagaaggtcggattcgaccccaagggtgttcccttcgtccccatctcaggatggcacggagacaacatgatcgaggagtccaccaacatgccttggtacaagggatggaagaagaccaccaagaccggcgagtacaagggaaagaccctgctcgaggccatcgactccatcgagccccccacccgtcctaccgacaagcctctccgacttcccctccaggatgtctacaagattggtggtatcggaacagtgccagtcggacgagtcgagactggtaccatcaaggctggtatggtcgtcaccttcgctccttcagctgtcaccaccgaagtcaagtctgttgagatgcaccacgagcagctcgaggctggtcttccaggtgacaacgtcggattcaacatcaagaacgtttcagtcaaggatatccgaagaggaaacgtctgcggtgactccaagaacgatccccccaaggaggctgcttccttcaccgcccaggtcattgtcctcaaccaccccggtcaaatcggtaacggatactctccagttctcgattgccacactggtgagtcattcttccatattagtttgaactcttttgaacaatactaacgtgaatcattatacttttcagcccacattgcatgcaagttcgacaccctcctagagaagattgaccgacgatccggaaagtccatcgaagatacccccaagttcgtcaagtctggtgacgccgccatcgtcaagatggtccccaccaagccaatgtgcgttgaggctttcaccgactacccacctcttggacgattcgccgtccgtga

SEQ ID NO: 452 - DNA, 1289 bp, Sporobolomyces salmonicolor ATCC 32311
aagctcaaggccgagcgtgagcgtggtatcaccatcgatatcgctctctggaagttcgagacccccaaggtgcgttctcaccccggctgaggagcacgcacgcgagggctcacgctgcgcctcttacagtacatgatcaccgtcatcgacgccccgggtcaccgtgacttcatcaagaacatgatcaccggtacctcgcaggccgactgcgccatcctcatcatcgccgccggtaccggtgagttcgaggctggtatctcgaaggacggccagacccgcgagcacgccctcctcgccttcaccctcggtgtccgtcagctcatcgtcgccatcaacaagatggacacgaccaagtactcggaggcccgtttcgaggagatcatcaaggagacctccaacttcatcaagaaggtcggcttcaaccccaagaacgtccccttcgtccccatctcgggatggcacggtgacaacatgattgaggagaccgccaacatgccctggtacaagggatggaagaaggagaccaaggccggtgaggtcaagggcaagaccctcctcgacgccatcgacgcgatcgagcccccttcgcgccctaccgacaagcccctccgtcttcccctccaggttcgtttccctgctcgcggtttacgctgctacttcgagctgacccgcgagctctgcccgaacaggatgtctacaagatcggtggtatcggcacagtccccgtcggccgtgtcgagaccggcacgatcaaggccggtatggtcgtcgtcttcgccccggccaacgtcaccactgaggtcaagtcggtcgagatgcaccacgagcagctcgaggctggtctcccgggagacaacgtcggcttcaagtgcgtctcatcatgtttttgcttcgctcggccattttttcagtcctgaccccgttttgcccctcgacagcgtcaagaacgtttccgttaaggacatccgtcgcggtaacgtctgcggtgactcgaagaacgacccccccaaggaggccgcttccttcaaggcccaggtcatcgtcatgaaccaccccggtcagatcggcaacggttacgctcccgttctcgactgccacaccgcccacattgcctgcaagttcgacaccctcctcgagaagatcgaccgtcgctcgggcaagtcgattgaggacctccccaagttcgtcaagtcgggtgacgccgccatcgtcaagatggttccctccaagccgatgtgtgtcgagtcgttcgccgagtacccccctctcggacgtttcgccgtccgtga

SEQ ID NO: 453 - DNA, 1070 bp, Sporothrix schenckii strain WSA-148
gtgagcgcggtatcaccatcgatattgctctgtggaagttcgagacccccaagtactacgtcaccgtcattgacgcccccggtcatcgcgatttcatcaagaacatgatcactggtacctcgcaggccgactgcgccattctcatcattgccgctggtactggtgagttcgaggctggtatctccaaggatggccagactcgtgagcacgctctgctcgcctacaccctgggtgtgcggcagctgatcgtcgccatcaacaagatggacacggccaagtgggctgaggctcgttaccaggagatcatcaaggagacctccaacttcatcaagaaggtcggctacaaccccaagactgttgccttcgtccccatctcgggcttccacggcgacaacatgcttactccctcgaccaactgcccctggtacaagggctgggagaaggagggcaagagcggcaaggttaccggtaagactctgctggacgccattgacgccgtcgagccccccaagcgccccacggacaagcccctgcgtctgcccctccaggatgtctacaagatcggcggtatcggcactgtccctgtcggccgtatcgagactggtgtcctgaagcccggcatggtcgtcacctttgccccgtccaacgtcaccactgaagtcaagtccgtcgagatgcaccacgagcagcttgttgagggtgttcccggcgacaacgtcggcttcaacgtcaagaacgtctccgtcaaggagatccgtcgtggcaacgttgccggtgactccaagaacgaccccccctcgggcgccgccaccttcaacgcccaggtcattgtcctgaaccaccccggccaggtcggcaacggctacgccccggttctggactgccacaccgcccacattgcctgcaagttcaccgagatccttgagaagatcgaccgccgtaccggcaagtcggttgagaacaaccccaagttcatcaagtcgggtgacgccgccattgtcaagctgacgccctcgaagcccatgtgcgttgaggccttcactgactacccccctctgggccgtttcgcc

SEQ ID NO: 454 - DNA, 1092 bp, Stephanoascus ciferrii ATCC 52550
cttaagtctgagcgtgagagaggtatcaccatcgatattgctctctggaaattcgagactcctaagtacaacgttaccgtcattgatgctccaggtcacagagatttcatcaagaacatgattactggtacctcccaggccgatcttgccatccttatcattgctggtggtgtcggtgagttcgaggctggtatctccaaggacggtcagaccagagagcacgctcttctttctttcacccttggtgtcagaaacatgattgttgctgtcaacaagatggactccgtcaagtggtctgaggatcgtttcaacgaaattgtcaaggagacctccaacttcgtcaagaaggttggttacaaccctaagaatattgctttcgttcctatctccggttggaacggtgacaatatgattgagccatccaccaactgcccatggtacaagggttgggagcgtgagaccaagaacggtactgccaagggtaagaccatcttggaggccattgactctatggagccaccttccagaccagttgacaagcctctccgtcttcctcttcaggacgtttacaagattggtggtattggtacggtgccagttggtcgtgttgagactggtgttatcaagccaggtatggttgttacctttgccccagctggtgtcaccactgaagtcaagtctgtcgagatgcaccacgaacagatcccagaaggtaccccaggtgacaacgttggtttcaacgtcaagaacgtctccgtcaaggaaatcagacgtggtaacgttactggtgactccaagaacgacccaccaaagggctgcgactctttcaacgctcaggtcatcatcttcaaccaccctggtcagatctctgctggttacgctccagttttggactgccacactgctcacattgcttgcaagtttgaggagctcattgagaagattgacagacgttccggtaagaaggtcgaagactctcctaagttcgtcaaggccggtgatgccgccattgtcaagatggttccatccaagccaatgtgtgttgaaaccttcactgagtacccacctcttggtcgtttcgccgtccgtgac

SEQ ID NO: 455 - DNA, 1149 bp, Trichophyton mentagrophytes strain WSA-225
gccgagcgtgagcgtggtatcaccatcgatatcgccctctggaagttcgagacccccaagtacaatgtcaccgtcattggtatgttttctctttacctttcccctccatcgtcttgctgtgccataactaacgagagtagacgcccccggtcaccgtgacttcatcaagaacatgatcactggtacctcccaggccgactgtgctattctcatcattgctgccggtactggtgagttcgaggctggtatctccaaggatggccagacccgtgagcacgctctgctcgccttcacccttggtgtcaagcagctcatcgttgccatcaacaagatggacaccaccaactggtccgaggaccgtttcaaggaaatcatcaaggaagtcaccaacttcatcaagaaggttggctacgaccccaagggtgttccattcgttccaatctctggtttcaacggtgacaacatgattgaggcctccaccaactgcccatggtacaagggatggaacaaggagactaaggccggtggtgccaagactggcaagaccctcctcgaggccatcgatgccatcgacatgccaacccgtcctaccgacaagcccctccgtctcccactccaggatgtctacaagatctctggtatcggaactgtaccagtcggtcgtgttgagaccggtatcatcaagcccggtatggtcgtcaccttcgcccctgccaacgtcaccactgaagtcaagtccgtcgaaatgcaccaccagcagcttcagcagggtgtccccggtgacaacgtcggcttcaacgtcaagaacgtttccgtcaaggaagtccgccgtggtaacgttgccggtgactccaagaacgacccaccatccggctgtgcctccttcaacgcccaggtcatcgtcctcaaccaccccggccagatcggtgctggttacgccccagtcctcgactgccacactgctcacattgcttgcaagttcgctgagctcctcgagaagattgaccgccgtaccggtaaatccgtcgaagccaaccccaagttcgtcaagtctggtgatgccgctatcgccaagatggttccctccaagcctatgtgcgttgaggctttcactgactaccccccacttggtcgtttcgccgtccgtga

SEQ ID NO: 456 - DNA, 1101 bp, Trichosporon cutaneum ATCC 62965
tcttgacaagcttaaagctgaacgtgaacgtggtatcaccattgatatcgctctctggaagttcgaaactcctaagtactacgttactgttattgatgctccaggtcaccgtgatttcatcaagaacatgattactggtacttcccaagccgactgcgccattcttatcattgctgccggtgtcggtgaattcgaagctggtatctccaaggaaggtcaaaccagagaacacgctcttctcgctttcacccttggtgtcagacaacttatcattgccatcaacaagatggactctgtcaagtgggaccaaaagagatacgaagaaatcgtcaaggaggcttccaacttcgtcaagaaggttggttacaaccccaagtctgttccattcgttcctatctctggttggaacggtgacaacatgttggaacctaccaccaacgccccatggtacaagggatggaccaaggaaaccaaggctggtgccactaagggtatgactcttattgaagccattgacgccattgaaccaccagtaagaccatccgacaagccactccgtctcccactccaagatgtttacaagattggtggtatcggaactgtgccagtcggccgtgtcgaaaccggtatcatcaaggccggtatggtcgtcacctttgctccaccaatggtcacaactgaagttaagtccgttgaaatgcaccacgaacaacttgctcaaggtaacccaggtgacaacgttggtttcaacgtcaagaacgtttccgttaaggaaatcagacgtggtaacgtctgtggtgactccaagaacgatccaccaaagggctgcgaatctttcaacgctcaagttatcgtcttgaaccaccctggtcaaatctctgctggttactctccagttctcgattgccacactgcccacattgcctgcagattcgacgaactccttgaaaagatcgaccgtcgttccggtaagaagattgaagactctccaaagtttgtcaagtctggtgatgccgctatcgtcaagatgatcccaaccaagccaatgtgcgttgaaaccttcactgaatacccaccacttggtcgtttcgccgtccgtga

SEQ ID NO: 457 - DNA, 1085 bp, Wangiella dermatitidis strain WSA-229
gttgaaggccgagcgtgagcgtggtatcaccatcgatatcgccctctggaagttcgagacccccaagtactatgtcaccgtcatcgacgccccgggtcatcgtgactttatcaagaacatgatcactggtacctcgcaggccgactgcgccatcttgatcattgccgccggtaccggtgaattcgaagccggtatctccaaggatggtcagacccgtgagcacgctctgctcgcctacaccttgggtgtcaagcagctcatcgtcgccatcaacaagatggacaccaccaagtggtccgaggagcgtttcaacgaaatcatcaaggagacttccaacttcatcaagaaggtcggctacaaccccaaggccgttcctttcgtccccatctccggcttcaacggtgacaacatgattgaggtctccaccaactgcccgtggtacaagggatgggagaaggagtccaaggctggcaaggccaccggcaagaccctcctcgaggccattgacgccatcgacccacccacccgtcccaccgacaagcctctccgtctccctctccaggatgtctacaagatctctggtatcggaacggttcctgtcggtcgtgtcgagaccggtaccatcaaggccggtatggtcgtcaccttcgctccggccaacgtcaccactgaagtcaagtccgtcgaaatgcaccacgagcagctcgccgagggtctgccaggtgacaacgttggcttcaacgtcaagaacgtctccgtcaaggaggttcgtcgtggtaacgttgccggtgactccaagaacgacccgcccaagggtgccgagtccttcaacgcccaggtcattgtcctcaaccaccctggtcagatcggtgccggctacgctccagtcttggattgccacactgcccacattgcttgcaagttcgccgagttgctcgagaagatcgaccgtcgtaccggaaagtccatcgagaacaaccccaagttcatcaagtctggtgatgctgccatcgtcaagatgattcccagcaagcccatgtgtgtcgaggctttcaccgactatcctcctctgggtcgtttcgctg

SEQ ID NO: 458 - DNA, 492 bp, Aspergillus fumigatus strain DAL-95
tgtcttcatccggaattgattgtgagtcgttccacatgctcacctagttttcgctcgatcttttcactaacgcaaaccatgtagaacaacattgccaaggcccacggtggttactccgtcttcactggtgttggtgagcgtactcgtgagggtaacgatctgtaccacgaaatgcaggagactggtgtcattcagctcgagggtgaatccaaggtcgcactggtgttcggacagatgaacgagccccccggtgcccgtgcccgtgtcgcccttaccggtctgaccattgccgagtacttccgtgacgaggagggtcaggacgtgctgctcttcattgacaacattttccgtttcacccaggccggttctgaggtgtctgcccttctcggtcgtatcccctctgccgtcggttaccagcccaccctggccgtcgacatgggtggtatgcaggagcgtatcaccaccaccaagaagggttctattacctccgtc

SEQ ID NO: 459 - DNA, 1154 bp, Blastoschizomyces capitatus ATCC 10663
gtccgtggtcaagaagttattgacactggtgccccaattaccattcctgttggtcgtggtactcttggtagaattatcaacgtcattggtgaaccaattgacgaacgtggtcctatcaaggcttctaagtatgctcctatccatactgaaccaccaacctttgctgaacaatctacttctgctgaagttcttgaaactggtatcaaggttgtcgatcttcttgctccttacgcccgtggtggtaagattggtcttttcggtggtgctggtgtcggtaagactgtcttcattcaagaacttattaacaacattgccaaggctcacggtggtttctctgtcttcactggtgtcggtgaaagaacccgtgaaggtaacgatctttaccgtgaaatgaaggaaactggtgtcatcaacctcgaaggtgactccaaggtcgctctcgttttcggtcaaatgaacgaacctccaggtgcccgtgcccgtgtcgctttgactggtcttaccattgccgaatacttccgtgatgaagaaggacaagatgtcttgcttttcgttgacaacattttcagattcacccaagccggttctgaagtctctgctcttttgggtcgtattccatctgccgtcggttaccaacctacccttgctaccgatatgggtgccctccaagaacgtattaccaccacccaaaagggttccgtcacatctgtccaagccgtctatgtcccagcagacgatttgactgatcctgccccagccaccactttcgctcacttggacgccaccactgtcttgtctcgttccatttccgaattgggtatctacccagctgtcgatcctctcgattccaagtctcgtcttttggatcctgaagttattggacacgaacactacgaagttgccactcaagttcaacaaaccctccaagcttacaagtctctccaagatatcattgccattttgggtatggatgaattgtctgaagctgataagcttactgtcgaacgtgcccgtaagatccaaagattcctttcccaaccattcgctgttgccgaagttttcactggtatcgaaggtcgtctcgttccattgaaggaaaccgtcagatctttcaaggaaatccttgaaggtaagtacgatcaccttccagaagc

SEQ ID NO: 460 - DNA, 1295 bp, Candida albicans ATCC 18804
ccaattcgacgaaggaaacttgccagctattttgaatgctttgactttgaagaacggtgaccaagacttggtcttggaagttgctcaacatttgggtgaaaacaccgtcagagctattgctatggatggtactgaaggtttagtcagaggtaccgaagtcaacgataccggtgccccaatctccgtcccagtcggtagaggtactttaggtagaatcatcaatgttgttggtgaaccaattgatgacagaggtccaattgaatgtaaggaaaagaaaccaattcacgctgaaccaccatcattcgttgaacaatccactgctgccgarattttggaaaccggtatcaaggttgtcgacttgttggccccatacgccagaggtggtaarattggtttattcggtggtgctggtgtcggtaagaccgtctttatccaagaattgattaacaacattgccaaagcccatggtggtttctctgtctttaccggtgtyggtgaaagaaccagagaaggtaacgatttgtaccgtgaaatgaaagaaaccggtgtcatcaacttggaaggtgactccaaggtcgctttggtcttcggtcaaatgaacgaaccaccaggtgctagagctagagttgctttgactggtttgaccattgctgaatacttcagagatgaagaaggtcaagatgtcttgttgttcattgataacattttcagattcacccaagctggttccgaagtgtctgctttgttaggtcgtattccatctgctgtcggttatcaaccaaccttagccactgatatgggtcttttgcaagaacgtattaccaccaccaagaaaggttccgtcacctctgtccaagctgtctatgtcccagctgatgatttgaccgatcctgctccagccactacattcgcccatttggatgccactactgtcttgtctagaggtatttctgaattgggtatctacccagctgtcgatccattggattccaaatccagattattggacgcttctgttgttggtcaagaacattacgatgtcgctactggtgttcaacaaactttacaagcttacaaatccttacaagatatcattgctattttgggtatggatgaattgtctgaagctgataaattgactgtcgaaagagcccgtaagatccaaagattcttgtctcaaccattcgctgttgctgaagttttcactggtatcccaggtagattagtcagattgcaagacactgtcaaatcattcaaggatgttttggaaggtaaatacgataacttgccagaaa

SEQ ID NO: 461 - DNA, 1277 bp, Candida dubliniensis strain NCPF 3949
taacttgccagctattttgaatgctttgactttgaagaacggtgaccaagatttagttttggaagttgctcaacatttgggtgaaaacaccgtcagagctattgctatggatggtactgaaggtttagtcagaggtactgaagtcaacgataccggtgccccaatctccgttccagtcggtagaggtaccttaggtagaatcatcaatgttgttggtgaaccaattgatgacagaggtccaattgaatgtaaggaaaagaaaccaattcatgcagaaccaccatccttcgttgagcaatccactgctgccgaaattttggaaaccggtatcaaggttgtcgacttattggccccatacgccagaggtggtaagattggtttgttcggtggtgctggtgtcggtaagaccgtctttatccaagaattgattaacaacattgctaaagcccatggtggtttctccgtctttaccggtgtcggtgaaagaaccagagaaggtaacgatttgtaccgtgaaatgaaagaaaccggtgtcatcaacttagaaggtgactccaaggtcgctttggtctttggacaaatgaacgaaccaccaggtgctagagctagagttgctttgactggtttgactattgctgaatacttcagagatgaagaaggtcaagatgtcttgttgttcatcgataacattttcagattcacccaagctggttccgaagtgtctgctttgttaggtcgtattccatctgccgtcggttatcaaccaaccttagctactgatatgggtcttttgcaagaacgtattaccaccaccaagaaaggttccgtcacctctgtccaagctgtctatgtcccagctgatgatttgaccgatcctgctccagccaccacattcgcccatttggatgccactactgtcttgtctagaggtatttctgaattgggtatttacccagctgtcgatccattggattccaaatccagattattggacgctgccgttgttggtcaagaacattatgatgtcgctactggtgttcaacaaactttgcaagcttacaaatccttacaagatatcattgctattttgggtatggatgaattgtctgaagctgataaattgactgtcgaaagagcccgtaagattcaaagattcttgtctcaaccattcgccgttgctgaagttttcactggtattccaggtagattagtcagattgcaagacactgtcaaatcattcaaggatgttttggaaggtaaatacgatcacttgccag

SEQ ID NO: 462 - DNA, 1278 bp, Candida famata ATCC 62894
gtaacttgccagctattttgaacgctttgaccttgaagaacggtgaaaacgacttagttttagaagttgcccaacatttgggtgaaaacaccgtcagagctattgctatggatggtactgaaggtttagttagaggtactccagttaccgattctggtgctccaatttctgtcccagtcggtagaggtactttaggtagaatcttgaacgttattggtgaaccaattgatgaacaaggtccagttgatgccaaggaaaccagaccaattcaccaagacccaccagcattcgttgatcaatccaccaaggctgaagttttggaaactggtatcaaggttgtcgatttattagccccttacgctagaggtggtaagattggtttattcggtggtgccggtgtcggtaagaccgtctttatccaagaattgattaacaacattgccaaggcccatggtggtttctctgttttcactggtgtcggtgaaagaaccagagaaggtaacgatttatatagagaaatgaaggaaactggtgtcattaacttggaaggtgactccaaggtcgccttggttttcggtcaaatgaacgaaccaccaggtgctagagctagagttgctttaaccggtttaaccattgccgaatacttcagagacgaagaaggtcaagatgtgttattgttcgtcgataacatttttagattcacccaagccggttccgaagtgtctgctttgttaggtcgtattccatcggctgtcggttatcaaccaaccttagccactgatatgggtcttttacaagaaagaattaccaccaccaccaagggttccgttacttctgtccaagctgtctacgtcccagccgatgatttaaccgatcctgctccagctaccactttcgcccacttggatgctaccactgtgttgtctcgtggtatctctgaattgggtatttacccagctgtcgatccattggattccaaatccagattgttagatgctgatatcgttggtaaagaacactacgaagttgccactggtgtccaacaaaccttacaagcttacaaatctttacaagatatcattgctattttaggtatggatgaattgtctgaagccgataaattgactgtcgaaagagccagaaagatccaaagattcttgtctcaaccattcgccgttgccgaagttttcaccggtatcccaggtagattagttagattgcaagacactgttaaatctttcaaggaagtcttagaaggtaaatatgatcacttaccag

SEQ ID NO: 463 - DNA, 1154 bp, Candida glabrata ATCC 66032
tctggtcagaggcgagaaggtcgtcgacacaggtgccccaatctccgtccctgtcggcagagagaccctgggcagaatcatcaacgttatcggtgaacctatcgacgagcgtggcccaatcaactcaaagttgagaaagcctatccacgccgaccctccttccttcgcagaacagtccaccgccgccgaagtcctggaaacaggtatcaaggtcgtcgacttgctggccccttacgccagaggtggtaagatcggtctgttcggtggtgccggtgtcggtaagaccgtgttcatccaagaactgatcaacaacatcgcaaaggctcacggtggtttctccgtgttcacaggtgtcggtgaaagaaccagagaaggtaacgatttgtacagagaaatgaaggaaaccggtgtcatcaacttggaaggtgactctaaggtcgccttggtcttcggccaaatgaacgaaccaccaggagccagagccagagtcgccttgaccggtttgaccatcgcagaatacttcagagatgaagaaggtcaagatgtcctgctgttcgtcgacaacattttcagattcacccaagccggttcagaagtctccgctttgctaggtcgtatcccatccgccgtcggttatcaaccaaccttggccaccgatatgggtctgttgcaagaaagaattaccaccacaaagaagggttccgtcacttccgtccaagccgtctacgtgcctgcagatgatttaacagatcctgcccctgccactactttcgcgcacttggacgccaccaccgtcttgtccagaagtatctcagaattgggtatctacccagctgtcgacccattggactccaagtctagattgctagacgctgccgttgtcggtgaagagcattacaacgtcgccacaaaggtccaagaaactttacaaacttacaagtctctgcaagatatcatcgccattttgggtatggatgaattgtccgaacaagataagctaactgtcgaaagagcaagaaagatccaaagattcttgtcccaaccattcgctgtcgctgaagttttcaccggtatcgaaggtaagctggtcagattgaaggacaccatctcctctttcaaggctgtcttggaaggtaagtacgatgatcttccag

SEQ ID NO: 464 - DNA, 1293 bp, Candida guilliermondii ATCC 6260
ccactacgaggacggtaaccttcctgctattttcaacgccttgactcttaagaacggtgaccaaaacttggttttggaagttgcccagcatttgggtgaaaacaccgtcagaaccattgctatggatggtactgaaggtttggttagaggtgccagcgtcactgacactggtgctcctatctctgtgcctgttggtcgtggtactttgggtcgtatcatcaacgttattggtgagccaattgacgagcgtggaccaatcgagtccaagcaaaagaagcccattcacgctgaaccaccatcgttcgtcgaacaatccacttctgccgaggttttggaaaccggtatcaaggttgtcgacttgttggctccatacgccagaggtggtaagattggattgttcggtggtgccggtgtcggtaagactgtgtttatccaagagttgattaacaacattgccaaggctcacggtggtttctccgtgttcaccggtgtcggtgaaagaaccagagaaggtaacgatttgtaccgtgaaatgaaggaaactggtgtcatcaacttggaaggtgaatccaaggtggccttggtgttcggtcaaatgaacgaacctccaggagctagagccagagttgcccttaccggtttgaccatcgctgaatacttcagagatgaggagggtcaagatgtgttgttgttcgtcgacaacattttcagattcactcaagctggttctgaagtgtcggctttgttgggtcgtattccttcggctgtcggttaccaacctactttggccaccgatatgggtttgttgcaagagcgtattaccaccaccaagaagggttccgtcacctctgtccaagctgtctatgtgccagccgatgatttgaccgatcctgctcctgctactacttttgctcacttggatgctaccactgtgttgtctagaggtatctccgagttgggtatttacccagctgtcgatcctttggattccaagtcgagattgttggatgcctctgttgtcggtgaggagcactactcggttgcttctaacgttcaacaaaccttgcaagcttacaagtctttgcaagatatcattgccattttgggtatggacgaattgtcggaagctgacaagttgaccgtcgagagagcccgtaagatcgagagattcttgtctcaaccatttgctgttgccgaagttttcactggtatcagtggtaagttggtcagattggaggacactatcagatctttcaaggaagtcttggaaggtaagtacgatcacttgccaga

SEQ ID NO: 465 - DNA, 1293 bp, Candida haemulonii ATCC 22991
cactttgacgatggtaacttgccagccattttcaacgccttgaagttgaagaacggtgaccaggacttggtcttggaggtcgcccagcacttgggtgagaacaccgtcagaaccattgccatggacggtaccgatggtttggtcagaggcgaggctgtcactgacactggtgctccaatctccgtgcctgttggtcgtgagactttgggtcgtatcatcaacgttattggtgagccaattgacgagagaggaccaatcaagtccaagaagagaaacccaatccacactgacccaccaaccttcgttgagcagtctacttctgctgaggttttggagactggtattaaggttgtcgacttgttggccccttacgccagaggtggtaagattggtttgttcggtggtgccggtgtcggtaagaccgtctttatccaagagttgattaacaacattgccaaggcccacggtggtttctctgtctttaccggtgtcggtgagagaaccagagaaggtaacgatttgtaccgtgaaatgcaggagaccggtgtcatcaacttcgagggtgactccaaggtcgccttggtcttcggtcagatgaacgagccaccaggagctagagctagagttgctttgaccggtttgaccattgccgaatacttcagagatgaagaaggtcaggatgtgttgttgttcgttgacaacattttcagattcactcaggctggttccgaggtgtccgccttgttgggtcgtattccatctgctgtcggttaccagccaaccttggccaccgatatgggtaccttgcaagaaagaattaccaccaccaagaagggttccgtcacctctgtccaggccgtttacgtgccagctgatgatttgaccgatcctgccccagctaccactttcgctcacttggatgctaccactgtgttgtctagaggtatttccgagttgggtatctacccagctgtcgacccattggactccaagtctagattgttggatgcctctgttgtcggtaaggagcactacgatgttgctaccaacgtccagcagaccttgcaggcctacaagtccttgcaggatatcattgccattttgggtatggatgaattgtccgaagccgacaagttgactgtcgagagagctagaaagattcagagattcttgtcccagccattcgccgtcgccgaggttttcactggtatcgagggtaagttggtcagattggaggagaccgtcaagtctttcaaggaggtcttggatggtaagtacgaccacttgccagag

SEQ ID NO: 466 - DNA, 1111 bp, Candida inconspicua ATCC 16783
aacggtggatctaagttagtcttagaagttgctcaacatttgggtgaaaacactgtcagaaccattgctatggatggtactgaaggtttagttagaggtcaaccagttaatgatactggtgctccaatctctgtcccagtcggtagaggtactttaggtagaatcttaaacgttattggtgatccagtcgatgaaagaggtccaattgattgtaaggaaagaaaaccaattcatcaagatcctcctgctttcgttgaacaatctactgaagctgaagttttagaaaccggtattaaggttgttgatttattagctccttacgctagaggtggtaagattggtttattcggtggtgctggtgtcggtaaaaccgttttcattcaagaattaattaacaatgttgcaaaggctcatggtggtttctcagttttcactggtgtcggtgaaagaaccagagaaggtaatgatttatacagagaaatgaaggaaactggtgttattaacttagaaggtgaatctaaggtcgccttagttttcggtcaaatgaatgaaccaccaggagcaagagcaagagttgctttaaccggtttaactattgctgaatacttcagagatgaagaaggtcaagatgtcttgttattcattgataacattttcagatttactcaagcaggttctgaagtttctgcattgttaggtagaattccatccgctgtcggttatcaaccaactttagcaactgatatgggtcttttacaagaaagaattacaactactaagaaaggttccgttacttctgtccaagcagtttatgtcccagcagatgatttaactgatcctgctccagcaactactttcgcccacttagatgcaactactgtcttatctagaggtatttccgaattaggtatttacccagctgtcgatccattagattctaaatctagattattagatgttgctgttgttggtcaagaacattatgatgttgcaactcaagttcaagaaactttacaagcatacaaatctttacaagatattattgctattttaggtatggatgaattatctgaacaagataaattaaccgttgaaagagcaagaaagattc

SEQ ID NO: 467 - DNA, 1283 bp, Candida kefyr ATCC 28838
tcgaacaaggtcaattgccagaaattttgaacgctttggagattgawactcctcaaggtaagttggttttggaagttgcccaacatttgggtgaaaacaccgtcagaaccattgctatggacggtaccgaaggtttggtccgtggtgagaaggttttggacactggtgctccaatttccgtcccagtcggtagagaaactttgggtagaatcatcaacgttattggtgagccaattgacgaaagaggcccaatcaagtccaagatgagaaagccaattcacgctgaccctccatcctttgttgaacaatccactgctgctgaagttttggaaaccggtatcaaggttgtcgacttgttggccccatacgccagaggtggtaagattggtttgttcggtggtgccggtgtcggtaagaccgttttcatccaagagttgattaacaacattgccaaggcccatggtggtttctccgtcttcaccggtgtcggtgaaagaaccagagaaggtaacgatttgtaccgtgaaatgaaggaaaccggtgtcatcaacttggaaggtgactccaaggtcgccttggtcttcggtcaaatgaacgaaccacctggagctagagccagagttgccttgaccggtttgactatcgctgaatacttcagagatgaagaaggtcaagatgtgttgttgtttatcgacaacattttcagattcacacaagccggttccgaagtgtccgctttgttgggtcgtattccatccgctgtcggttaccaacctactttggccaccgatatgggtttgttgcaagaaagaattaccactaccaagaagggttccgttacctccgtccaagctgtctacgtccctgctgatgatttgactgatcctgctccagctacyactttcgcccatttggacgccaccaccgtgttgtccagaggtatctccgaattgggtatctacccagctgtcgatccattggattccaagtctagattgttggacgctgccgttgtcggtcaagaacattacgacgtcgctactcaagttcaacaaactttgcaagcttacaagtctttgcaagatatcattgccattttgggtatggatgaattgtctgaacaagacaagttgactgtcgaaagagccagaaagatccaaagattcttgtctcaaccattcgccgtcgccgaagttttcactggtatcccaggtagattggtcagattaaaggacaccatcgcttccttcaaggctgttttggaaggtaagtacgatcacttg

SEQ ID NO: 468 - DNA, 1287 bp, Candida krusei ATCC 34135
cttcgaacaaggccaattaccacaaattttaaacgctttagttatggataatggtggtaacaagttagttttagaagttgctcaacatttaggtgaaaacactgtcagaaccattgctatggatggtactgaaggtttagttagaggtcaaaccgttaacgataccggtgctccaatctctgtcccagttggtagaggtaccttaggtagaatcttgaacgtcattggtgatccagtcgatgaaagaggtccagttgactgtaaggaaagaaagccaattcacgctgatcctccagctttcgttgaacaatccactgaagctgaagttttggaaactggtattaaggttgtcgatttattagcaccttacgcaagaggtggtaagattggtttattcggtggtgctggtgttggtaagaccgtttttatccaagaattgatcaacaatgtygcaaaggctcatggtggtttctccgttttcactggtgttggtgaaagaaccagagaaggtaacgatttatacagagaaatgaaggaaactggtgttattaacttggaaggtgaatccaaggtcgccttagttttcggtcaaatgaacgaaccaccaggagctagagcaagagttgctttaactggtttgaccattgcagaatatttcagagatgaagaaggtcaagatgtcttgttattcattgataacattttcagattcacccaagcaggttctgaagtctctgcattattaggtagaattccatctgctgtcggttatcaaccaactttagcaaccgatatgggtcttttacaagaaagaattaccaccaccaagaagggttccgttacttctgtccaagctgtttatgtcccagccgatgatttaaccgatcctgctccagctactactttcgcccacttggatgcaaccactgtcttgtcyagaggtatttccgaattaggtatctacccagctgtcgatccattagattctaagtctagattattagatgttgcagttgttggtcaagaacattatgaagttgcaactcaagtccaagaaactttacaagcttacaagtctttacaagatattattgctattttgggtatggatgaattatctgaacaagataagttaacygttgaaagagcaagaaagatccaaagattcttatctcaaccattctctgttgcagaagttttcactggtattccaggtaagttagtcagattagaagaaaccatcaagtctttcagggatgttcttgcaggtaagtacgatcacttacc

SEQ ID NO: 469 - DNA, 1283 bp, Candida lambica ATCC 24750
tcgaacaaggtcaattaccaccaattcttaacgctttggtcatggaaaacgatggtcaaaagttagttttggaagttgctcaacatttgggtgaaaacaccgtcagaaccattgctatggacggtaccgaaggtttagttagaggtcaacctgttaacgacactggtgctccaatctctgtcccagttggtagaggtactcttggtagaatcttgaacgtcactggtgacccagtygatgaaagaggtcctgtcgamtgtaaggagagaagaccaattcaccaagacccacctgctttcgttgaccaatccactgaagctgaagttttggaaaccggtattaaggttgtcgatttattagcaccttacgctagaggtggtaagattggtttgttcggtggtgctggtgtcggtaagaccgttttcatccaagaattgattaacaatgttgctaaggcccacggtggtttctccgttttcactggtgtcggtgaaagaaccagagaaggtaacgatttatacagagaaatgaaggaaaccggtgttattaaccttgaaggtgaatctaaggtcgccctcgttttcggtcaaatgaacgaaccaccaggagcaagagctagagttgctcttactggtttgaccattgctgaatacttcagagatgaagaaggtcaagatgtcttgcttttcattgacaacattttcagattcacccaagcaggttccgaagtgtctgctttgttaggtagaattccwtctgccgttggttaccaaccaaccttagcaaccgatatgggtttgttacaagaaagaattaccaccaccaagaagggttccgtcacctccgtccaagctgtttacgtcccagctgatgatttractgaccctgcaccagcaaccactttcgcccacttggatgctaccaccgtcttgtctagaggtatttccgaattaggtatttacccagctgtcgatccattagattctaagtctagattattggatgtcgctgttgtcggtcaagaacattataccgttgcaacycaagtccaagaaactttacaagcttacaagtccttacaagatatcattgctattttgggtatggacgaattatctgaacaagataagcttactgttgaaagagcaagaaagatccaaagattcctttcccaacctttctccgtcgcagaagttttcactggtatcccaggtaagcttgtcagattagaagaaaccattatttctttcagagatgtcctcgatggtaagtacgaccactta

SEQ ID NO: 470 - DNA, 1140 bp, Candida lusitaniae ATCC 66035
aggtgcctctgtcactgacactggttctccaatctctgtccctgttggtcgtgaaaccttgggtagaattatcaacgttgttggtgagccaattgacgagagaggcccaatcaactccaagaagagaaacccaattcacactgagccaccatcgtttgttgaacaatccacttctgctgaagttttggagactggtatcaaggttgtcgacttgttggccccttacgccagaggtggtaagattggtttgttcggtggtgccggtgtcggtaagaccgttttcatccaagagttgattaacaacattgccaaggcccacggtggtttctctgttttcactggtgtcggtgaaagaaccagagaaggtaacgatttgtaccgtgaaatgcaagagaccggtgtcatcaacttcgagggtgactccaaggtcgccttggtcttcggtcaaatgaacgaaccaccaggagccagagctagagttgctttgaccggtttgactattgccgagtacttcagagacgaagagggccaagatgtcttgttgttcgttgacaacattttcagattcacccaggccggttctgaagtgtctgctttgttgggtcgtattccatccgctgtcggttaccaaccaaccttggccaccgatatgggtgctttgcaagagagaattaccaccaccaagaagggttccgtcacctctgtccaagccgtttatgttccagctgatgacttgactgaccctgctccagccaccaccttcgcccacttggacgccaccactgtgttgtccagaggtatctctgaattgggtatctacccagctgtcgacccattggactccaagtctagattgttggacgcttctattgttggtaaggagcactacgaagttgcttctaacgttcaacaaactttgcaagcttacaagtctttgcaagatatcattgccattttgggtatggatgaattgtctgaggctgacaagttgaccgttgagagagccagaaagatccaaagattcttgtctcaaccattcgctgttgccgaggttttcactggtatcccaggtagattggtcagattggaggacactgtcagatccttcaaggaagttttggacggtaagtacgaccactt

SEQ ID NO: 471 - DNA, 1296 bp, Candida norvegensis ATCC 22977
tcaattcgaacaaggtcaattaccaccaattttaaacgctttagtcatggacaacggtggaactaagttagttttagaagttgctcaacatttaggtgaaaacaccgtcagaaccattgctatggatggtactgaaggtttagttagaggtcaaccagttaatgatactggtgctccaatctctgtcccagtcggtagaggtactttaggtagaatcttaaacgttattggtgatccagtcgatgaaagaggtccaatcgattgtaaggaaagaaaaccaattcatcaagatcctcctgctttcgttgaacaatcaactgaagctgaagttttagaaactggtattaaagttgtcgatttattagctccttacgctagaggtggtaagattggtttattcggtggtgcaggtgttggtaaaaccgtttttattcaagaattaattaacaatgttgcaaaagctcatggtggtttctccgttttcactggtgtcggtgaaagaactagagaaggtaacgatttatacagagaaatgaaggaaactggtgttattaatttagaaggtgattctaaggtcgcattagttttcggtcaaatgaacgaaccacctggagcaagagcaagagttgctttaactggtttaactattgctgaatatttcagagatgaagaaggtcaagatgtcttgttattcattgataacattttcagatttactcaagcaggttctgaagtttccgctttgttaggtagaattccatccgctgtcggttatcaaccaactttagcaactgatatgggtcttttacaagaaagaattactactactaagaaaggttctgttacttccgttcaagcagtttatgtcccagcagatgatttaactgatcctgctccagcaactactttcgcccacttagatgcaactactgtcttatctagaggtatttccgaattaggtatttacccagctgtcgatccattagattctaaatctagattattagatgttgcagttgttggtcaagaacattatgatgttgcaactcaagttcaagaaactttacaagcttacaaatctttacaagatattattgctattttaggtatggatgaattatctgaacaagataaattaaccgttgaaagagctagaaaaattcaaagattcttatctcaacctttctctgtcgcagaagttttcactggtatcccaggtaagcttgttagattagaagaaactatttcttcattcagagatgtcttagcaggtaagtacgatcacttaccagaaaa

SEQ ID NO: 472 - DNA, 1297 bp, Candida parapsilosis ATCC 90018
acacttcgaagaaggaaacttgccagctattttgaacgctttgaccttgaaaaacggtaaacaagacttggtcttggaagttgcccaacatttgggtgaaaacaccgtcagagcaattgctatggatggtactgaaggtttagttagaggtacttctgtcactgacactggtgccccaatttctgtcccagttggtagaggtactttgggtagaatcatcaatgttactggtgacccaattgatgaaagaggtccaattgaatgtaagaagagaaacccaatccacgctgaaccaccttcattcattgaacaatccactgctgctgaagttttggaaaccggtattaaggttgtcgacttgttggctccatacgctagaggtggtaagattggtttgttcggtggtgccggtgtcggtaaaaccgtgtttatccaagaattgatcaacaacattgccaaggcacatggtggtttctcggttttcactggtgttggtgaaagaaccagagaaggtaacgatttgtaccgtgaaatgaaggaaactggtgttatcaacttggaaggtgactccaaggtcgctttggttttcggtcaaatgaacgaaccacctggagctagagctagagttgctttgactggtttgaccattgctgaatactttagagatgaagaaggtcaagatgtcttgttgtttattgacaacattttcagattcacccaagctggttcagaagtgtctgctttgttgggtcgtattccatccgctgtcggttatcaaccaaccttggccaccgatatgggtcttttgcaagaacgtattaccactaccaaaaagggttcagttacttcagtccaagccgtttacgtgccagctgatgatttaaccgatcctgctccagctaccactttcgctcacttggatgccaccactgtgttgtctagaggtatttcggagttgggtatttacccagctgtcgatccattggattccaaatccagattgttggatgctgccgttgttggtcaagaacattacgacgttgccactggtgttcaacaaactttacaagcttacaagtccttgcaagatatcattgctatcttgggtatggatgaattgtccgaacaagataaattgactgtcgaaagagctcgtaagattcaaagattcttgtctcaaccatttgctgtcgctgaagttttcactggtattccaggtaaattggttagattgtctgaaactgtcaagtcattcaaggaagtcttggaaggtaagtacgataacttgccagaaaat

SEQ ID NO: 473 - DNA, 1285 bp, Candida rugosa ATCC 96275
ccagtttggcaacgacctccctgccattttgaacgccctcactcttcagcgtgaagacggtaacaagcttgttcttgaggttgcccagcatctcggtgagaacaccgtccgtaccattgctatggacggtaccgagggtttggtgcgtggcactggtgtccacgacaccggacaccccatcatgactcccgtcggtgacggtaccctgggacgtattcttaacgtcaccggtgaccctgtagacgagcgtggtcccgtcaagactgacaagttccgccccatccacgccgaggcccctgccttcgatgagcaggctaccagtgccgaggttcttgagaccggtatcaaggttgtcgacttgctcgctccttacgccaagggtggtaagattggtttgttcggtggtgccggtgtcggcaagaccgtcttcatccaggagctgattaacaacatcgccaaggcccacggtggttactccgtgttcactggtgtcggtgagcgtactcgtgagggtaacgatttgtacaaggaaatgatcgagtccggtgtcatcaacctcgatggtgagtccaaggtcgccttggtgttcggtcagatgaacgagccccctggagcccgtgcccgtgtcgcccttaccggtcttaccatcgctgagtatttccgtgatgaggagggtaaggatgtcttgttgttcgttgacaacattttccgcttcactcaggccggttctgaggtgtccgccttgcttggtcgtattccttccgctgtcggttaccagcctaccctggccaccgatatgggtgcccttcaggagcgtatcaccaccaccaagaagggttccgttacatccgtccaggccgtctacgtccctgccgatgatttgactgatcccgcccctgccaccaccttcgcccatttggatgccaccactgtcttgtctcgtgccatctctgagttgggtatctaccccgctgtcgaccctctcgactccaagtcccgtcttcttgacgccgctgtcgttggtcaggagcactacgatactgccacctccgttcagcagactttgcaggcttacaagtctttgcaggatatcattgccattcttggtatggatgagttgtccgagtctgacaagctcaccgtcgagcgtgctcgtaagatccagcgtttcctctcccagcctttcgctgttgctgaggtcttcactggtattcagggccgtcttgttcctctcaaggacactgtccgctccttcaaggagattctcgaaggtaagtacgatgct

SEQ ID NO: 474 - DNA, 1283 bp, Candida sphaerica ATCC 2504
ttgaacaaggtcaattgccagctattttgaacgctttggaaatcgacactccagaaggaaagttggttttggaagtcgctcaacatttgggtgaaaacactgtcagaaccattgctatggatggtactgaaggtttagtccgtggtgaaaacgtttctgacactggtgctccaatttccgtcccagttggtagagaaaccttgggtagaattatcaacgttattggtgagccaattgacgaaagaggtccaatcaactccaagatgagaaagccaattcatgctgatcctccattattcgttgaacaatccactgctgctgaagttttggaaactggtatcaaggttgtcgacttgttggccccatacgccagaggtggtaagattggtttgttcggtggtgccggtgtcggtaagaccgttttcatccaagaattgattaacaacattgccaaggctcatggtggtttctctgtcttcactggtgtcggtgaaagaaccagagaaggtaacgatttgtaccgtgaaatgaaggaaactggtgttatcaacttggaaggtgattctaaggtcgcgttggttttcggtcaaatgaacgaacctcctggagctagagctagagtcgccttgactggtttgaccatcgctgaatacttcagagatgaagaaggtcaagatgtcttgttgtttatcgacaacattttcagattcacacaagccggttccgaagtgtccgctttgttgggtcgtattccatccgctgtcggttatcaaccaactttggccaccgatatgggtttgttgcaagaaagaattactaccaccaagaagggttccgtcacttctgtccaagccgtttacgtgccagctgatgatttgactgatcctgctccagctaccactttcgcgcatttggatgccaccactgtgttgtccagaggtatctctgaattgggtatctacccagctgtcgatcctttggattccaaatctagattgttggatgctgccgtcgttggtcaagaacattacgatgtcgctactcaagttcaacaaactttgcaagcttacaagtctttgcaagatatcattgccattttgggtatggatgaattgtccgaacaagataagttgaccgtcgaaagagctagaaagattcaaagattcttgtctcaacctttcgctgtcgctgaagtcttcactggtatcccaggtagattggtcagattaaaggacaccatctcttctttcaaggctgtcttggacggtaagtacgatcacttg

SEQ ID NO: 475 - DNA, 1290 bp, Candida tropicalis ATCC 13803
cgacgaaggtaacttgccagctattttgaatgctttgactttgaagaacggtgaccaagacttggttttggaagttgctcaacatttgggtgaaaacaccgtcagggctattgctatggatggtaccgaaggtttagtcagaggtactgctgtcactgataccggtgctccaatttctgtcccagttggtagaggtaccttgggtagaattatcaacgttgttggtgaaccaattgatgacagaggtccaattgaatgtaaggaaagaaagccaattcacgctgaaccaccttcattcgttgaacaatctactgctgccgaaattttggaaaccggtattaaggttgtcgatttgttggctccttacgctagaggtggtaagattggtttgttcggtggtgctggtgtcggtaaaaccgtcttcatccaagaattgattaacaacattgccaaagctcatggtggtttctctgtctttaccggtgtcggtgaaagaaccagagaaggtaacgatttgtaccgtgaaatgaaagaaactggtgtcatcaacttggaaggtgactccaaggtcgccttggtcttcggtcaaatgaacgaaccacctggtgctagagctagagttgctttgactggtttgaccattgctgaatacttcagagatgaagaaggtcaagatgtcttgttgttcattgacaacattttcagattcacccaagctggttccgaagtgtctgctttgttgggtcgtattccatctgctgtcggttatcaaccaaccttggccactgatatgggtcttttgcaagaacgtattaccaccaccaagaaaggttctgttacttctgtccaagctgtttatgtcccagccgatgatttaaccgatccagctccagctaccaccttcgctcacttggatgccactactgtcttgtctagaggtatttctgaattgggtatttacccagctgtcgatccattggattctaaatccagattattggatgctactgttgttggtcaagaacattatgatgttgccactggtgttcaacaaactttacaagcttacaagtccttgcaagatatcattgctattttgggtatggatgaattgtccgaagccgataaattgactgtcgaaagagctcgtaagattcaaagattcttgtcccaaccattcgctgttgccgaagttttcactggtatcccaggtagattggttagattacaagatactgttaaatctttcaaagatgtcttggaaggtaaatacgatcacttgccagaaaa

SEQ ID NO: 476 - DNA, 1267 bp, Candida utilis strain Csp 388
tttgaacgcccttgagatcaagaaccacgagtctggaagattggtcctcgaggttgcccagcacttgggtgagaacactgtcagaactattgccatggatggtaccgaaggtctcgtccgtggtgagtctgttgttgacaccggttctccaattactgtcccagttggtcgtgagaccttgggtcgtatcatcaacgttattggtgagccaattgatgagcgtggtccaatcaacaccaagcacagaaacccaattcacgctgagccaccatccttcgctgagcagtctactgctgctgaggttttggagactggtatcaaggttgtcgaccttctcgccccatacgccagaggtggtaagattggtctctttggtggtgccggtgtcggtaagaccgttttcatccaggagttgattaacaacattgccaaggcccacggtggtttctctgttttcaccggtgtcggtgagagaaccagagagggtaacgatttgtaccgtgagatgaaggagactggtgtcatcaatctcgagggtgagtccaaggttgctctcgtcttcggtcagatgaacgagccaccaggtgcccgtgcccgtgtcgctttgaccggtttgaccattgctgagtacttcagagatgaggagggtcaggatgtcttgttgtttattgacaacattttcagattcacccaggccggttccgaggtgtctgccttgcttggtcgtattccatccgctgtcggttaccagccaactttggccaccgatatgggtttgttgcaggagagaattaccaccacccagaagggttccgtcacttctgtccaggccgtttacgtcccagctgatgatttgactgatcctgctccagccaccactttcgcccacttggacgccaccactgtgttgtcccgtggtatctctgagttgggtatttacccagctgtcgacccattggactccaagtccagattgttggacgctgccgttgttggtgacgagcactacaacaccgccaccgatgtccagcagacccttcaggcttacaagtctctccaggatatcattgctattttgggtatggatgagttgtctgaggctgacaagttgactgtcgagagagccagaaagattcagcgtttcctttcccagccattcgctgtcgctgaggttttcaccggtatcccaggtagattggttagacttcaggacaccatcaagtccttcagagaggttttggacggtaagtacgaccacttgccagag

SEQ ID NO: 477 - DNA, 1296 bp, Candida viswanathii ATCC 28269
ccaattcgacgaaggtagcttgccagctatcttgaacgccttgaccttgaagaacggtgaccaagacttggtcttggaagttgcccaacacttgggtgaaaacactgtcagagctattgctatggatggtaccgaaggtttggtcagaggtactgctgtcactgacaccggtgctccaatctccgtcccagtcggtagaggtaccttgggtagaatcatcaacgttgttggtgaaccaattgacgacagaggtccaattgaatgtaaggaaagaaagccaattcacgctgaaccaccttctttcgttgaacaatccactgctgccgaaattttggaaaccggtatcaaggttgtcgacttgttggccccatacgccagaggtggtaagattggtttgttcggtggtgccggtgtcggtaagactgtctttatccaagagttgattaacaacattgccaaggcccatggtggtttctctgtcttcactggtgtcggtgaaagaaccagagaaggtaacgatttgtaccgtgaaatgaaggaaaccggtgtcatcaacttggaaggtgactccaaggtcgccttggttttcggtcaaatgaacgaaccacctggtgctagagctagagttgctttgactggtttgaccattgccgaatacttcagagacgaagaaggtcaagatgtcttgttgtttattgacaacattttcagattcacccaagccggttccgaagtgtctgctttgttgggtcgtattccatctgccgtcggttatcaaccaaccttggccaccgatatgggtcttttgcaagaacgtattaccaccaccaagaagggttccgtcacctctgtccaagctgtctatgtcccagccgatgatttgaccgatcctgctccagccaccaccttcgctcacttggatgccactactgtcttgtctagaggtatttccgaattgggtatctacccagctgtcgatccattggactccaagtccagattgttggatgctgctgttgttggtcaagaacattacgatgttgccactggtgtccaacaaaccttgcaagcttacaagtctttgcaagatatcattgccattttgggtatggatgaattgtctgaatccgataagttgactgtcgaaagagctcgtaagatccaaagattcttgtcgcaaccatttgctgttgccgaagttttcactggtatcccaggtagattagttagattgctggaaaccgtccaatctttcaaagacgtcttggctggtaaatacgatcacttgccagaaaa

SEQ ID NO: 478 - DNA, 1295 bp, Candida zeylanoides ATCC 7351
tcaattcgagcaaggcaacctccctgccatcttgaacgctctcaccttgaagaatggtgacaacgacttggttttggaagttgcccagcacttgggtgagaacaccgtcagagccattgccatggatggtaccgagggtttggttagaggtgcgtccgtcaaggacactggcgcccctatctcggtccccgttggccgcgggactttgggtcgtatcatcaacgtcaccggtgaccccattgacgagagaggtcccatcgagctgacccagagaaaccctatccacgccgaccccccctcgttcgttgagcagtccaccaacgctgaggttttggagactggtatcaaggttgtcgatttgttggctccctacgccagaggtggtaagattggtttgttcggtggtgccggtgtcggtaagaccgtcttcattcaggagttgatcaacaacatcgccaaggcccacggtgggttctcggtcttcactggtgtcggtgagagaactagagagggtaacgacttgtaccgtgagatgaaggagaccggtgtcatcaacttggagggtgactccaaggtggccttggtgttcggtcagatgaacgagccccctggagccagagccagagtcgccttgaccgggttgaccattgccgaatactttagagacgaggagggtcaggatgtgttgttgttcgtcgacaacatcttcagattcacccaagctggttcggaggtgtcggccttgttgggtcgtattccctctgccgtcggttaccagcccaccttggcaactgatatgggattgttgcaggagcgtatcaccacgaccaagaagggttccgtcacctcagtgcaggccgtctacgtccccgctgatgacttgactgaccctgctcccgccaccacctttgcccacttggacgccaccaccgtgttgtccagaggtatctctgagttgggtatctaccccgccgtcgaccccttggactccaaatcgagattgttggacgctgccgtggtcggtcaggagcactacgatgttgcctcgaacgtccagcagaccttgcaggcctacaagtccttgcaggatatcattgccattttgggtatggatgagttgtccgaggctgacaagttgaccgttgagagagccagaaagatccagagattcttgtcgcagcccttcgctgttgccgaggttttcactggtatcaagggtagattggtcagattggaggacaccgtcagatctttcaaggaggttttggagggtaagtacgaccacttgcccgaga

SEQ ID NO: 479 - DNA, 534 bp, Coccidioides immitis strain Silveira
ttcaggaattgattgtaagttctgttatcaactaaagccgacagcggttgctgatatgctctagaacaacattgctaaggctcacggtggttactccgtgttcactggtgtcggtgagcgtacccgtgagggtaacgatttgtaccatgaaatgcaagagacccgtgtcattcaactcgacggagagtccaaggtcgctcttgtcttcggtcaaatgaacgagccccctggtgcccgtgcccgtgttgcccttaccggtttgaccattgctgaatacttccgtgacgaggaaggccaagacggtaggcttcatgcttctatcgctaggggcgtgtgatacaggaggctaatcgcttttctagtgcttctctttattgacaacattttccgtttcactcaagctggttctgaagtgtctgccttgctcggtcgtattccttccgctgtcggttaccaacctactctcgccgtcgacatgggtgttatgcaggaacgtatcaccaccaccaccaagggatccattacttcagtgca

SEQ ID NO: 480 - DNA, 494 bp, Cryptococcus albidus ATCC 66030
cgtcttgattcaagaattgatcaacaacatcgccaaggcccacggtggttactcggtcttcaccggtgtcggtgagcgaactcgagagggtaacgatctgtaccacgaagtgagttgcgccgtccgagtgtttcccggggaatcgcaagactgatgttgtcccttcttctcagatgagggaaaccggtgtcatcaacctcgagggtgactccaaggtcgccttggtcttcggtcagatgaacgagccccctggagcccgagcccgagtcgccttgaccggtttgaccattgccgaatacttccgagacgaggagggtcaggatgtcttgttgttcattgacaacattttccgattcacccaagccggttccgaagtgtccgccttgttgggtcgtatcccctccgccgtcggttaccagcccactctgtccaccgacatgggtaccatgcaggagcgaattaccaccaccaagaagggttccatcacttccgtc

SEQ ID NO: 481 - DNA, 415 bp, Fusarium oxysporum strain WSA-212
ttcaggagcttatcaacaacatcgccaaggcccacggtggttactccgtcttcactggtgtcggtgagcgaactcgtgagggtaacgatctgtaccacgaaatgcaggagacttccgtcattcagcttgatggcgagtccaaggtcgccctggtcttcggtcagatgaacgagccccctggagctcgtgcccgtgtcgcccttaccggtcttactgtagctgaatacttcagagatgaggagggtcaggacgtgctgctcttcattgacaacattttccgattcactcaggccggttccgaggtgtctgcccttctcggtcgtatcccctctgccgtcggttaccagcccaccctcgccgtcgacatgggtggtatgcaagagcgtattaccaccaccaccaagggttccattac

SEQ ID NO: 482 - DNA, 1281 bp, Geotrichum spp. strain LEV-4
aggacaacctccccgctattcttaacgctcttgagcttaagagagataacggtgagaagctcgttctcgaggttgcccagcatctgggtgagaacactgtccgtactattgctatggacggtactgagggtctcgtccgtggtcagcccgttgttgacaccggtgcccccattaccattcccgttggtcgtggtactcttggtagaattatcaacgtcattggtgagcccatcgatgagcgtggacccattgaggctaccaagtacctccccatccacaccgagccccccaccttcgctgagcagtctacctccgctgaggttcttgagactggtatcaaggttgtcgatctccttgccccctacgcccgtggtggtaagattggtctcttcggtggtgccggtgtcggtaagaccgttttcattcaggagctgattaacaacattgccaaggcccatggtggtttctccgttttcaccggtgtcggtgagagaacccgtgagggtaacgatttgtaccgtgagatgaaggagaccggtgtcatcaacctcgagggtgagtctaaggtcgctctcgttttcggtcagatgaacgagccccctggagcccgtgcccgtgttgctcttactggtcttaccattgctgagtacttccgtgatgaggagggtcaggatgtgttgctcttcgttgacaacattttccgtttcactcaggccggttccgaggtgtctgcccttttgggtcgtattccctccgctgtcggttaccagcccacccttgccactgatatgggtgccctgcaagagcgtattaccaccacccagaagggttccgtcacttccgtccaggccgtctacgtccctgccgatgatttgaccgatcctgcccctgctaccaccttcgcccatttggatgccaccaccgtcttgtcgcgttccatttctgagttgggtatctaccccgctgtcgatccccttgattccaagtctcgtcttttggatatcaccgtcgttggccaggagcactacgatgttgctacccaggtccagcagaccctccagtcctacaagtctcttcaggatatcattgccattttgggtatggatgagttgtctgaggctgataagcttactgtcgagcgtgcccgtaagatccagagattcctttcccagcccttcactgtcgctgaggttttcactggtatcgagggccgtctcgttcctttgaaggacactgttcgctctttcaaggagatccttgagggcaagtacgaccacctcc

SEQ ID NO: 483 - DNA, 586 bp, Histoplasma capsulatum strain G186A5
attcaagaattgatcgtacgttcctccgccccacacacgatcaatggagaaagaaacaaattttttgggagtggtcattttttctaataattcgaatagaacaacattgccaaagcccacggtggttactccgtgttcactggtgtcggcgagcggacccgtgaaggaaatgacttgtaccacgaaatgcaggaaacccgtgttatccagctcgatggagagtccaaggtcgccctcgttttcggtcagatgaacgagcctcccggagcccgtgcccgtgttgccctcactggtctgaccgttgccgagtacttccgtgacgaggaaggccaagacggtatgtataagtatacaccgtagcaaatcaacacagagcttcactcacgctcggatttagtgcttctcttcatcgacaacattttccgcttcactcaggccggttccgaagtgtctgccctgctcggccgtattccctccgccgtcggttaccaacccaccctcgccgtggacatgggtggtatgcaggaacgtatcaccactaccaccaagggctccatcacctctgtgcargccgtctacgtccccg

SEQ ID NO: 484 - DNA, 1145 bp, Malassezia furfur ATCC 42132
gcgtggccagaaggtcattgacactggtgctcccatcaccatccccgtcggtggtgccacactgggtcgtattctgaacgtcacgggtgaccctattgacgagcgtggccccgttaagactgacgttttccgccccattcaccgtgacccccctgcctttgtcgagcagtcgactgatgccgagattctcgagactggtatcaaagtcgttgacctgattgccccttacgcccgtggtggtaagattggtctgttcggtggtgccggtgtcggtaagaccgtgcttatccaggagctcatcaacaacatcgccaaggcccacggtggtttctccgtgttcactggtgtcggtgagcgtactcgtgagggtaacgatttgtaccacgagatgattgaaaccggtgtcattaacctcgagggtgactcgaaggtggctctggtgttcggtcagatgaacgagcccccgggtgcccgtgcgcgtgtcgctcttactggtctgactgtggccgagtacttccgtgacgacgagggccaggatgtgctgctgttcattgacaacattttccgtttcacccaggccggttcggagacttcggctctgctgggtcgtatcccttcgtcggtcggttaccagcccactttgtcgaccgatatgggtgccatgcaggagcgtatcaccaccaccaagaagggttcgattacgtcggtgcaggccgtctacgtgcccgccgatgatgtcactgaccctgcccctgccactaccttcgcccaccttgacgctaccactgtgcttgaccgttcgatcgctgagctgggtatctaccccgctgttgacccgttgaactcgaactcgcgtatgcttgaccccgctattgtgggtcaggagcactacgacgtggcctctggcgtgcagaagctgctccaggactacaagtcgcttcaagatatcattgccattctgggtatggatgagctttctgaggaggacaagctcactgtcgagcgtgcccgtaagatgcagcgtttcatgtcgcagcctttcgctgtcgcccaggtctttactggtatcgaaggtcgtcttgttgccctgaaggacacgatcaaggcctgcaaggagatcctgtcgggcaagcacgacaacctcc

SEQ ID NO: 485 - DNA, 1261 bp, Malassezia pachydermatis ATCC 42756
tcccgccatcttcaacgccctggaggtccaggacatgaagaacggtggccgccttgttctggaggttgcccagcaccttggtgagaacactgttcgttgcattgctatggacggtaccgagggtcttgtccgtggtcagaaggtccttgacactggtgccccgatcactatccctgtcggtaacggtaccttgggccgyatcctgaacgtcactggtgagcctgtggatgagcgtggtccggttaagactgacgtctaccgtccaatccaccgtgagcccccggcgttcgttgagcagtcgactgatgctgagattcttgagactggtatcaaggtggtcgacctgctcgccccatacgctcgtggtggtaagattggtctwttcggtggtgcyggtgtyggtaagaccgtgctgattcaggagcttatcaacaacattgccaaggcccacggtggtttctcggtgttcactggtgtcggtgagcgtactcgtgagggtaacgatctgtaccatgaaatgattgagactggtgtcatcaacgttgacggtgactcgaaggtcgctctcgtgttcggtcagatgaacgagcccccgggtgcccgtgcccgtgtcgccctgacyggtctgaccatcgccgagtacttccgtgacgacgagggtcaggatgtgctgctcttcattgacaacattttccgtttcactcaggctggttcggagacttcggctctgctgggtcgtatcccgtcggctgtcggttaccagcckacccttgccacggatatgggtgccatgcaggarcgtatyaccaccaccaagaagggttcgattacctcggtgcaggcygtttacgttccggccgacgatgtgactgaccctgccccggccacgaccttcgcccacttggacgccaccacggtgttggaccgttcgattgcygagctgggtatctacccggccgtcgacccgctgaactcgaagtcgcgtatgcttgacccgtcaattgtcggtgtggagcactacaacgttgcttcgggtgtccagaagcttctycaggactacaagtcgctccaagatatcattgccattctgggtatggatgagttgtcggaggaggacaagctcactgtcgagcgtgcccgtaagatgcagcgtttcctgtcgcagcctttcgctgtggcccaggtcttcactggtatcgagggtcgtcttgtgtcgctcaaggacaccatcaacgcctgcaaggagattctgtccggtaag

SEQ ID NO: 486 - DNA, 1282 bp, Metschnikowia pulcherrima DSM 70336
aggagggcaacttgccagctatcttcaacgctttgacgttgaagaacggcgaccagaagttggtcttggaggtggcccagcacttgggtgagaacaccgtcagaaccattgccatggacggtaccgagggtttggtcagaggcgcctctgtcaccgacacyggtgcccctatctccgtgcctgtcggccgtgagaccttgggtcgtattatcaatgttgttggtgagccaatcgacgagagaggcccaatcaacaccaagaagagaaaccctattcacaccgacccaccttcgtttgtccagcaatccacttccgccgaggtcttggagactggtatcaaggttgtcgacttgttggccccttacgccagaggtggtaagattggtttgttcggtggtgccggtgtcggtaagaccgtgttcatccaggagttgattaacaacattgccaaggcccacggtggtttctccgttttcaccggtgtcggtgagagaaccagagagggtaacgatttgtaccgtgaaatgcaggagactggtgtcatcaacttcgagggtgactccaaggtcgccttggttttcggtcagatgaacgagcctccaggagctagagcyagagttgccttgaccggtttgaccatcgccgagtacttcagagacgaggagggtcaggatgtgttgttgttcgtcgacaacattttcagattcacccaagccggttctgaggtgtctgccttgttgggtcgtattccatccgctgtcggataccagccaaccttggccaccgatatgggtgccttgcaggagagaattaccaccaccaagaagggttccgtcacctccgtccaggccgtctacgtgccagccgatgacttgactgaccctgcgccagccaccactttcgcccacttggacgccaccactgtgttgtccagaggtatctctgagttgggtatctaccccgctgtcgaccccttggactccaactccagattgttggacgccaccgttgttggccaggagcactacgacgtcgccaccaacgtccagcaaactttacaagcttacaagtccttgcaggatatcattgccattttgggtatggatgagttgtccgagacccgacaagttgacccgtcgagagagccagaaagatccagaagttcttgtcccagccatttgccgtcgccgaggttttcaccggtattgagggtagattggttagattggaggacaccgttagatcctttaaggaggttttggaaggtaagtacgaccacttg

SEQ ID NO: 487 - DNA, 482 bp, Penicillium marneffei strain WSA-214
tgtctttatccaggagttgattgtacgtctttacctttctgcctgactgtttacgacaactaacgaaagcgtagaacaacattgccaaggctcacggtggttactctgtcttcactggtgtcggtgaacgtactcgtgagggtaacgatttgtaccacgaaatgcaggaaactggtgtcattcagctcgagggtgaatccaaggtcgccctcgtgttcggtcagatgaacgagccccccggtgcccgtgcccgtgtcgctcttactggtttgaccattgccgagtacttccgtgacgaggaaggtcaggacgtgcttctcttcattgacaacattttccgtttcactcaggccggttctgaggtgtctgcccttctgggtcgtatcccctctgccgtcggttaccagcccacccttgccgtcgacatgggtatcatgcaggagcgtattaccaccaccaccaagggttccatcacctccgtc

SEQ ID NO: 488 - DNA, 1290 bp, Pichia anomala ATCC 18205
tcgaacaaggtaacttaccagctatcttgaatgctttagaaatcaaaaccccaagtggtactccattagttttagaagttgctcaacatttaggtgaaaacactgtcagaactattgctatggatggtactgaaggtttagttcgtggtgaacaagttactgatactggttctccaatcactgtcccagttggtcgtgaaactttaggtcgtattatcaacgttgttggtgaaccaattgatgaacgtggtccaattaacaccaaacaaagaaacccaattcacgctgaaccaccttcattcagtgaacaatcaactgctgctgaagttttagaaactggtatcaaagttgtygatttattagctccatacgctagaggtggtaaaattggtttattcggtggtgccggtgtcggtaaaactgtctttatccaagaattgattaacaacattgctaaagctcatggtggtttctcagttttcaccggtgttggtgaaagaaccagagaaggtaacgatttataccgtgaaatgaaagaaactggtgttattaacttggaaggtgattctaaggtcgctttagttttcggtcaaatgaatgaaccaccaggtgctagagctcgtgttgctttaactggtttgaccattgctgaatacttcagagatgaagaaggtcaagatgtcttgttattcgttgataacattttcagattcacccaagccggttcagaagtttctgccttattaggtcgtattccatctgctgtcggttatcaaccaactttagcaactgatatgggtttgttacaagaacgtattaccaccacacaaaaaggttcagttacttctgtccaagctgtttatgtcccagctgatgatttaacagatcctgctccagctaccactttcgcccatttggatgctactactgtcttgtctcgtggtatttcagaattaggtatttacccagctgtcgatccattagattctaaatcaagattattagatgcttcagttgttggtcaagaacattatgatgttgctaccaacgttcaacaaactttacaagcttacaaatctttacaagatattattgctattttaggtatggatgaattgtctgaacaagataaattgactgtcgaaagagcaagaaaaatccaaagattcttatctcaaccatttgctgttgccgaagttttcactggtatyccaggtagattggttagattaaaagacactatcaaatcattcaaagatgttttggaaggtaaatatgatcacttaccag

SEQ ID NO: 489 - DNA, 1291 bp, Pichia anomala ATCC 2149
ccaattcgaacaaggtaacttaccagctatcttgaatgctttagaaatcaaaaccccaagtggtactccattagttttagaagttgctcaacatttaggtgaaaacactgtcagaactattgctatggatggtactgaaggtttagtccgtggtgaacaagttactgatactggttctccaatcactgtcccagttggtcgtgaaactttaggtcgtattatcaacgttgttggtgaaccaattgatgaacgtggtccaattaacaccaaacaaagaaacccaattcacgctgaaccaccttcattcagtgaacaatcaactgctgctgaagttttagaaactggaatcaaagttgttgatttattagctccatacgctagaggtggtaaaattggtttattcggtggtgccggtgtcggtaaaactgtctttatccaagaattgattaacaacattgctaaagctcatggtggtttctcagttttcaccggtgttggtgaaagaaccagagaaggtaacgatttataccgtgaaatgaaagaaactggtgttattaacttggaaggtgattctaaggtcgctttagttttcggtcaaatgaatgaaccaccaggtgctagagctcgtgttgctttaactggtttgaccattgctgaatacttcagagatgaagaaggtcaagatgtcttgttattcgttgataacattttcagattcacccaagccggttcagaagtttctgccttattaggtcgtattccatctgctgtcggttatcaaccaactttagcaactgatatgggtttgttacaagaacgtattaccaccacacaaaaaggttcagttacttctgtccaagctgtttatgtcccagctgatgatttaacagatcctgctccagctaccactttcgcccatttggatgctactactgtcttgtctcgtggtatttcagaattaggtatttacccagctgtcgatccattagattctaaatcaagattattagatgcttcagttgttggtcaagaacattatgatgttgctaccaacgttcaacaaactttacaagcttacaaatctttacaagatattattgctattttaggtatggatgaattgtctgaacaagataaattgactgtcgaaagagcaagaaaaatccaaagattcttatctcaaccatttgctgttgccgaagttttcactggtatcccaggtagattggttagattaaaagacactatcaaatcattcaaagatgttttggaaggtaaatatgatcactta

SEQ ID NO: 490 - DNA, 508 bp, Rhodotorula minuta ATCC 10658
cgtattgattcgtgagtggccgttcccttacagcaagcttataaaggagcgaaaaagatctgacattcggcttatgtgctatacagaggaactcatcaacaacgtcgccaaggctcatggtggttactctgtcttcaccggtgtcggagagcgaacacgtgaaggtaacgatctctaccacgaaatgattgaaaccggtgtcattcagctcaagaacgacaagtccaaggccgctctggtcttcggacagatgaacgagccccccggagctcgtgcccgtgtcgctctgaccggtctcaccatcgccgagtacttccgtgacgtcgaaggacaggatgtgctactcttcatcgacaacattttccgattcacccaggccggttcagaggtatctgccctgctcggacgtatcccatctgctgtcggataccagcccacactctcaaccgatatgggtggtatgcaagagcgaatcacaaccaccaagaagggttcgattacctccgtc

SEQ ID NO: 491 - DNA, 686 bp, Rhodotorula mucilaginosa ATCC 66034
tgtcctcattcaggagctcatcaacaacatcgccaaggcccacggtggttactcggtcttcaccggtgtcggcgagcgtacccgtgagggtaacggtgagtctcccccttcaaacttttggccggctagttggcgcagcgcaaactgacgcgcgcgccctgtccagacttgtaccacgagatgatcgagactggtgtcatccagctcgagaacgacaactcgaagtgcgctctcgtgttcggccagatgaacgagccccctggtgcccgtgcccgtgtcgctctcactgggttcgtcctttctctctctcgagcgtcctggcttgatacggaacgctgacacgtcacgcagtctcactattgctgagtacttccgtgacgaggagggccaggacgtgctcctcttcatcgacaacatcttccgtttcacccagggtgagccgcctccgcgggcattctcccgtttctttcgcgctgacgtctgtcccgtatagccggttcggaggtgtctgcccttctcggacgtatcccgtccgctgtcggataccagccgactctctcgaccgacatgggtcagatgcaggagcgtatcacgtaagtttggccgcagctccgtccgcggcgccctttgtgtctgaccgtgttccaccgctcagcaccaccaagaagggctcgatcacctgtgtc

SEQ ID NO: 492 - DNA, 625 bp, Sporobolomyces salmonicolor ATCC 32311
tgtcttgattcaggagctcatcaacaacgtcgccaaggcgcacggtggttactccgttttcaccggtgtcggtgagcgtacccgtgagggtaacggtgagcacactttcgccgacctggccattccggaacgtgcggactgacgaggaccacctcgaacagatctctaccacgagatgatcgagaccggtgtcattcagctcgacaacgacaagtcgaagactgctctcgtcttcggccagatgaacgagccccctggcgcccgtgcccgtgtcgctcttactggtctcaccatcgcggagtacttccgtgacgacgagggccaggacgtgcttctcttcatcgacaacatcttccgtttcacccagggtacgttcgatcccgcccgtccaacacgaatgtcgtggtgactgacaacctgttgcgcgtgcagccggttcggaggtgtctgcccttctcggtcgtatcccgtccgctgtcggataccagcccactctctcgaccgacatgggtggcatgcaggagcgtatcacgtacgccctcttctgctttctctcgtttcgctctgcatcgctcacgcatgttcgcccgacagcaccaccaagaagggttcgatcacctgtgtc

SEQ ID NO: 493 - DNA, 1211 bp, Sporothrix schenckii strain WSA-148
tctcgtccgtggtgctaaggccactgacactggttcccccattaccatccccgtcggccccggtaccctcggtcgcatcatgaacgtcaccggtgacccgatcgacgagcgcggtcccatcaagaccgacaagttccgtcccatccacgctgaggctcccgagttcgttgaccagtcgaccaccgctgaggttctcgtgactggtatcaaggtcgtcgatctgcttgctccctacgcccgtggtggtaagattggtctgtttggcggtgccggtgttggcaagaccgtgttcatccaggagctcatcaacaacatcgccaaggcccacggtggttactccgtcttcaccggtgtcggcgagcgtacccgtgagggtaacgatctgtaccacgaaatgcaggagacctctgtcattcagcttgacggtgactccaaggtcgccctggtgttcggtcagatgaacgagccccctggtgctcgtgcccgtgtcgccttgaccggtttgactgtcgctgagtacttccgtgacgaggagggccaggatggtatgttttgaattatttccttgtcgtacagttccaaatcgaagaattactaacttgtcagtgcttctcttcatcgacaacattttccgcttcacccaggccggttctgaggtgtctgcccttctgggtcgtattccctccgctgtcggttaccagcccacgctcgccgtggacatgggtctgatgcaggagcgtattaccaccacccgcaagggctcaattacctccgtccaggccgtctacgtgcccgctgacgatctgacggatcccgcccccgccaccaccttcgcccatctggacgccaccactgtgctgtcccgaggtatctctgagctgggtatctaccccgctgtcgaccccctcgactccaagtcgcgtatgctggacccccgtattgtcggtgacgaccactacgagaccgccactcgcgtccagcagatcctccaagagtacaagtcgctgcaggacatcatcgccattctgggtatggacgagctgtctgaggccgacaagcttacagtcgagcgtgctcgtaagatccagcgtttcctgagccagccgttcacggtcgcgcaggtcttcactggtatcgaaggccagctggtcgatctgaaggacactatcgcttcgttcaaggctatcctgagcggtgagggtgacagcctt

SEQ ID NO: 494 - DNA, 1133 bp, Stephanoascus ciferrii ATCC 52550
tcttgttagaggcaccccagtcaaggacactggtgctccaattaccattccagttggtaacggcactttgggccgtatcgtcaacgttctcggtgagccaattgatgagcgtggaccagtcaaggctgacaagttcagacctattcacgctgagccaccaaccttcgctgaccagtccacctctgccgaggttcttgagaccggtattaaggttgtcgacttgcttgccccttatgccagaggtggtaagattggtcttttcggtggtgccggtgtcggtaagactgtgttcattcaggagcttattaacaacattgctaaggcccacggtggttactctgtcttcactggtgtcggtgagcgaactcgtgaaggtaacgatttgtaccacgaaatgatggagaccggtgtcatcaaccttgagggtgactccaaggtgtctcttgtgttcggtcagatgaacgagcctccaggagcccgtgcccgtgttgccttgaccggtttgaccattgccgagtacttcagagatgaggagggccaggatgtcttgttgttcattgacaacattttccgattcacccaggccggttctgaggtctctgccttgttgggtcgtatcccatctgccgtcggttaccaaccaaccttggctactgatatgggtggtcttcaagaacgtattaccaccactcaaaagggttccgtcacctctgtccaggctgtctacgtcccagctgacgatttgactgatcctgccccagctaccaccttcgcccatttggacgccaccaccgaattgtcccgatctatctctgagttgggtatctacccagctgtcgaccctcttggttccaagtcccgtcttttggatgcctccgtcgtcggccaagagcactacgacgttgccgccaacgtccaacagaccttgcaggcctacaagtctctccaggatatcattgccattttgggtatggacgaattgtctgaggctgataagctcactgtcgagcgtgctcgtaagatgcagagattcctttctcagccattcaccgtcgctgaggtcttcactggtctcgagggtagactcgtttctttgaaggacaccatccgatccttcaaggagatccttgacg

SEQ ID NO: 495 - DNA, 608 bp, Trichophyton mentagrophytes strain WSA-225
ggagttgattgtaagtcatttgaaacccagccccaagaaacagaagctaggcgaaaattggacaattgagcaatttagccattggagaaaagaaatttcgagtattaattgtttttatagaacaacattgccaaggctcacggtggttactctgtcttcactggtgtcggagagcgtacccgtgaaggaaacgatctctaccatgaaatgcaggagacccgtgtcattcagcttgatggcgagtccaaggtcgccctggtcttcggccagatgaacgagcccccaggtgcccgtgcccgtgttgctcttactggtttgaccattgctgagtacttccgtgatgaggaaggtcaagacggtgagtttcttatggataaaaaaaaatttttttttttttttttttttttcaagaaattcatgttctaacaaagtgtattctagtgcttctcttcatcgacaacattttccgtttcactcaggctggttccgaagtgtctgccctgcttggtcgtatcccatctgccgtcggttaccaacccactcttgccgtcgacatgggtggtatgcaggaacgtattaccaccaccaagaagggatccattacctcc

SEQ ID NO: 496 - DNA, 794 bp, Wangiella dermatitidis strain WSA-229
gtttattcaagaactcattgtgggtggcattctcataatgtttcggccacaattactgattgaaaatagaacaacattgcaaaggctcatggtggttactccgtgttcactggtgtcggcgagcgaactcgtgagggtaacgacttgtaccacgaaatgcaggagacctctgtcattcagctcgatggcgagtccaaggtcgcgctggtgtttggtcaaatgaacgaacctcctggtgctcgtgctcgtgttgctctgactgggtaagttgttccttcgcttcttgcgcgtatccacatccccatcttgagaatacgtctgccaccatgtcatgtgatgttgggctggttctggtttttgggaggccctcaagttcaatttttggatgacagcaccagctttacaagattatgctaacttaatggagtcttacggtggctgagttcttcagggatgaggagggacaggatggtaagtttgataacaatctcgtcggtgtcaatatcgacggcgtactcttcgcatcaaaaaaccaaagaggtggtttggtgtgagaagtgcgccggaaataatggcaaccacgtgacaatgaccacgtgtggggctcccgtgctaacacgtgacagtcttgctcttcatcgacaacattttccgattcactcaasccggttctgargtgtctgccttgcttggtcgtattccatctgccgtcggttaccaacccacactcgccgtcgacatgggtctcatgcaggaacgtatcaccaccacccggaagggatccatcacatctg

SEQ ID NO: 497 - DNA, 1148 bp, Yarrowia lipolytica ATCC 38295
tcttgtccgaggcaccgccgtcgctgacaccggtgctcccatcactatccccgtcggccgaggtacccttggtcgaatcatcaacgtctgtggtgagcccattgacgagcgaggacccatcgaggcttccaagtacctccccatccacgctgacccccctaccttcgctgagcagtctacctccgctgaggttctcgagaccggtattaaggtcgtcgacctcctcgccccttacgcccgaggtggtaagattggtctcttcggtggtgccggtgtcggtaagactgtcttcatccaggagctgattaacaacattgccaaggcccatggtggtttctccgttttctgcggtgtcggtgagcgaacccgagagggtaacgatctttaccgagagatgaaggagactggtgtcatcaacctcgagggtgagtctaaggtcaccctcgtcttcggtcagatgaacgagcctcccggagcccgtgcccgagtcgcccttactggtctgaccattgccgagtacttccgagacgaggagggtcaggatgtgttgctcttcgttgacaacattttccgattcacccaggccggttccgaggtgtccgctctgcttggtcgaattccctccgctgtcggttaccagcccactctggccaccgatatgggtgccctccaggagcgaattaccaccacccagaagggttccgtcacttccgtccaggccgtctacgtgcctgccgatgatttgaccgatcctgctcccgccaccaccttcgcccatcttgacgccaccaccgtcctgtcccgaggtatttccgagctgggtatctaccccgctgtcgatccccttgattccaagtctcgacttctggatatcgatgttgtcggaaaggagcactacgatgttgcttccaacgtccagcagaccctccaggcttacaagtctctccaggatatcattgccattcttggtatggatgagctgtccgagcaggacaagctgaccgtcgagcgagctcgaaagatccagcgattcctgtctcagcccttcaccgtcgccgaggttttcaccggtattgagggacgacttgtctctctcaaggacactgtccgatccttcaaggagatccttgacggtaagcacgatgctc

SEQ ID NO: 498 - DNA, 966 bp, Aspergillus fumigatus strain WSA-172
gcgctattgtcgttgttgctgcctccgacggtcagatgtaggtggaacatcttgggaaatacgtcgtaaaacacgtcgcttacgttttcgcgaataggccccagactcgtgagcatttgctgctcgcccgccaggttggtgtccagaagatcgttgtcttcgtcaacaaaatcgatgctattgatgatccggagatgctggaactggtcgaactcgagatgcgtgagctgctgaacagctacggtttcgagggtgaagagactccgatcattttcggttccgctctctgtgctctcgaaggacgccgtgacgacatcggtaaagacagaattgagcagcttatgaacgctgtcgacacctggatccccactcctcagcgtgacctcgacaaacctttcttgatgtctgtcgaggaagtgttctctatcgccggccgtggtaccgtggcttctggtcgtgtcgagcgtggtatcttgaagaaggactctgaggttgagattgttggaggctccttcgaacccaagaagaccaaagtcaccgacattgaaaccttcaagaagagctgtgatgaatcgcgtgctggtgacaactctggtctcctcctgcgtggtatccgacgtgaagacgtcaagcgtggtatggtcattgctgttcccggcagcaccaaggctcacgacaagttcctcgtctccatgtacgtcctgaccgaggcggagggtggtcgtcgtactggcttcggtgccaactaccgtccccaagtcttcatccgtactgcaggtaagttcccgcacaccgtgtccagatcttccgagagattagcgatatatgctaatgattcatcagacgaggctgctgacctcagcttccctgacggcgaccaatctcgcagagttatgcctggtgacaacgtcgagatgatcctgaagacccaccaccctgttgctgctgaggctggtcaacgcttca

SEQ ID NO: 499 - DNA, 846 bp, Blastoschizomyces capitatus ATCC 10663
tggtgctattattgttgttgctgcttctgatggtcaaatgccccaaacccgtgagcacttgcttcttgctcgtcaagttggtgttaagcacattgttgttttcgttaacaagattgatactattgatgatcctgaaatgttggaacttgtcgaaatggaaatgagagaacttctttcttcttacggttttgatggcgataacacccctgtcattatgggttctgctctctgtgctcttgaaggtcgtgaaccagaaattggtgaacaaagaatcaaccaactccttgatgctatcgatgaatacattcctaccccagttcgtgatatggaccaacctttcttgatgccacttgaaggtgttttctctattccaggtcgtggtactgttgccactggacgtgtctatcgtggtactttgaagagaggtgaagaagttgaagttgttggctacaatgatgctccaatcaagaccaccgttactggtattgaaatgttcaagaaggaacttgatcaagctcaagctggtgacaacgctggtattcttttgagaggtgttaagcgtgaagaccttaagcgtggtatggttgttgctaaaccaggtaccgttaagccacacaccaagttccttgcctccatctatgttttgactaaggaagaaggtggcagacactctggctttggtcttaactacagacctcaacttttccttggttctgctgatgttaccactgtcttgaccttcccagagggtgttgaccaaagcactcaagtcatgccaggtgacaacactgaaatggtttgcgaacttgttcacccagttgctgtcgaacaaggccaacgtttcaa

SEQ ID NO: 500 - DNA, 846 bp, Candida rugosa ATCC 96275
ggtgccattattgttgttgctgcctctgatggacagatgccccagacccgtgagcatcttttgcttgcccgccaagtcggtatgcaaaaggtcgttgtgtttgttaacaagattgataccattgatgaccctgaaatgcttgatcttgtcgagatggagatgcgtgaactgttgaatgaatatgacttcgatggagataactctcctgtcattatgggctctgctcttgctgctcttgaggacaagaaccccgagattggtaaggaccgtatcatgcagctcttggacgctgttgatgaatggatccctacccccgagcgtgaccttgacaagcctttcatgatgcctattgaggcctctttctccatttctggtcgtggtactgttgccactggccgtgtcgagcgtggtattctcaagaagggtgaggaagtcgagatcgttggtttcaacaagcagcccctgaaatctgttgttactggtattgaaatgttcaagaaggaacttgatcaggcccagggcggtgataatgctggtatcttgcttcgtggtattcgtcgtgaggacttgcagcgtggtatggttttggccaagcctggaactgttaaggctcacaccaagttcctttcctccatctacgttctctccaaggaagagggcggccgtcactctcctttcggtatgaactatcgtccccagatgttcgtttctgcagctgatgtcaccgttactcttactttccctgagggtgttgaacagcacactcaggtcttccctggtgagaacaccgagatggttggcgagctcgttcaccctactgctattgaggttggtcaacgcttcaac

SEQ ID NO: 501 - DNA, 944 bp, Coccidioides immitis strain Silveira
agttgtcgtcgttgctgcttcagacggtcaaatgtatgcaaccgagagcactcccggatcttggtttaaatggcactaatataagacaggcctcaaactcgagagcatttacttctcgcccgtcagatcggtatccaaaaaatcgtcgtcttcgtgaacaaggttgatgccatcgaggacaaagagatgttggagcttgttgaattggagatgcgtgaactcctaaccagctacggtttcgagggtgaagaaactcccatcatttttggctctgctctctgtgccctcgaaggaagacaacccgagatcggtgttaccaagattgatgagctcttgcaggccgtcgacacctggattcccactcctcagcgtgagactgacaagcccttcttgatgtccattgaggaagtgttctctatttccggacgaggaaccgttgtctccggccgtgtggagcgtggtatcctcaagaaggactccgaagttgaaattgtcggcggttcgcccgagccaatcaaaaccaaggttaccgatatcgaaacctttaagaagtcttgcgacgagtctcgcgctggtgataactccggcttgctcctacgaggcgttaagcgtgaagatattagccgtggcatggtcgtcgctgtaccaggaagtgtcaaggcccatactgaattcttagtttcgctttacgtcctcaccgaagctgagggtgggcgcaaatctggattcagcagcaagtaccgcccacagatgttcattcgcactgccggtatgtaatactgtgataatttcgttgacatggtactgattgaattctatagacgaagcggctcagctcagctggcccggagaagatcaagacaagatggctatgccaggagacaatatcgaaatgatttgcaccaccttgcacccagttgccgccgaggctggccagcgattca

SEQ ID NO: 502 - DNA, 849 bp, Fusarium oxysporum strain WSA-212
gctatcatcgtcgttgctgcctccgatggacagatgccccagacccgtgaacacttgctcctcgctcgtcaggtcggtgtccagcgaattgtcgtcttcgtcaacaaggtcgatgccattgatgaccccgagatgcttgagctcgtcgagatggagatgcgcgagcttcttaacacctacggcttcgaaggcgacgacactcccgtcatcatgggctctgctcttatgtctctccagaaccagcgccccgagattggcaccgagaagatcgatgagctccttgctgccgtcgacgagtggatcccaacccccgagcgtgaccttgacaagcccttccttatgtccgtcgaggatgtcttctccattgccggccgtggtaccgtcgtgtctggccgtgtggagcgtggtattctgaagcgtgatcaggagatcgagcttgtcggaaaggggcaggaggttatcaagaccaaggttaccgacattgagaccttcaagaagtcttgtgagcagtcccaggctggtgacaactctggtctcctcatccgaggtgttcgccgtgaggatgtccgccgtggtatggttgtctgcgctcctggcaccgtcaagtctcatacccagtttctcgcttccctctacgtcctcaccaaggaggagggtggccgacacaccggtttccaggagcactaccgaccccagctctatctccgaactgcagatgagtccattgacctgactttccccgagggtactgaggatgcctccagtaagatggtcatgcctggtgacaacaccgagatggttgtcaccatgggtcaccccaatgccatcgaggttggtcagcgattcaac

SEQ ID NO: 503 - DNA, 1064 bp, Histoplasma capsulatum strain G186A5
tggtgctattgtcgttgttgctgctgctgacggccaaatgtaagacgccgcgagggactgctgagggttttatgctttttaggcccccttgtttctgagagcatgatgatactaatattcggaaacgtatctattaggcctcaaacacgtgagcatttgctccttgcccgacaggtcggtgtccaaaagatcgtcgttttcgtgaacaaagtcgacgcccttgaggacaaggagatgttggagcttgtcgagttagaaatgagagagctcttaaacacctacggcttcgagggtgaagagacacccatcatctttggttctgccctttgcgccatggaaggccgtgagcctgagttgggagaaaagaaaattgatgaattgctggaggctgttgatacttggatccccacaccacaacgtgataccgaaaaacctttcttgatgtccgttgaggaagtattctctatctccggccgtggaaccgttgcctccggtcgtgttgagcgcggtgtcctcaagaaggattcagaagtcgagctaattgggggcggctccacccccatcaggacgaaggtaactgatatcgaaactttcaagaaatcctgtgacgagtctagagctggggacaactccggtcttttattgcgtggtatcaagcgtgaagatatccgccgtggtatggtagttgccgttcctggcagcgtcaaggcccacgacaagttcttggtgtcgatgtatgtcctgaccgaagctgagggtggtcgccgaaccggattcggccagaactatcgtcctcaaatgttcatccgcacagctggtatgtcaaaatgggaccccttttcataatcctttctttttttccttttcctctctatctctctttctgtttcctttcaactcgcctgattcacgaaattaactaacccgtttgattatagacgaagccgcccatctcagcttccctagtggagcagatgaaagcaaactcgttatgcctggtgacaacgtcgagatgatcctccagacacaccgccccgtggctgctgaggccggccagcgattca

SEQ ID NO: 504 - DNA, 982 bp, Paracoccidioides brasiliensis ATCC 32071
tggtgctatcgtcgttgttgctgcctctgacggccaaatgtagggattttgcaagactggtgaaaaaatctaaagaaaatagaaaagattgtgctgatgtttggtatcaggccccaaacacgcgagcatctgcttcttgccagacaagtcggtgttcagaaaatcgttgttttcgtcaacaaggtcgatgctgtagaggataaggagatgttggagcttgtcgaattggagatgagagagctcttgaccacctatgggttcgagggtgagaagacacctatcatctttggttctgcgctctgtgctatggagggccgtcagcccgagttgggagagcagaaaattgatgaattactcgaggctgtggatacttggatccctacgccacagcgtgatactgacaagcccttcctgatgtccattgaggaggtgttctctatctctggacgaggaaccgttgcctccggccgcgttgagcgtggtatcctcaagaaggactccgaagttgaaattattggcggcggtgttcccacaatcctgaccaaggtgactgatatcgaaaccttcaagaagtcttgcgacgagtccagagccggggacaactccggcctcttgttgcgcggtgtcaagcgtgaggatatccgccgtggtatggtcgttgcagttcccggaagcgtcaaagcacatgacagattcttggtgtcgatgtacgttctgaccgaggctgagggtggtcgccgcactggcttcggtcagaactatcgtcctcaaatgttcatccgcacagctggtacgttcattctttcactatattcctatatgcatagcccgatcctcccattaactaattgacacagacgaggctgctgaactcagctggcctgatggagacgacgaagccaaaatggtcatgcccggtgacaatgttgaaatggtcctgaagtcacaccgcccggggccgctgaggctggacagcgattca

SEQ ID NO: 505 - DNA, 931 bp, Penicillium marneffei ATCC 58950
cgctgttgttgtcgtcgctgcttctgatggtcaaatgtaacatatccacgagctgccaattatggacactgctgataagaataggccccaaacccgtgagcacttgctcctcgcccgtcaggtcggtgttcaaaagatcgtcgtcttcgtcaacaaggttgatgccgtcgaggaccccgagatgttggaacttgtcgaattggaaatgcgtgaactcttgaccacctacggtttcgagggtgaagagacccctatcattttcggatccgctctttgcgccttggaaggccgcaagcccgagattggcgaacagaagattgacgagctcatgaacgccgttgatacctggatccccaccccccagcgtgaccttgacaagcccttcttgatgtccgttgaggaagttttctccatctctggtcgtggtaccgttgcatctggtcgtgttgagcgtggtattttgcgcaaggattctgaggttgagattatcggataccagaagaaccctatcaagaccaaggttaccgacattgagaccttcaagaagtcttgcgatgaatctcgtgctggtgacaactctggcttgcttctccgtggtatcaagcgtgaggacattcgtcgtggtatggttatcgctgctcctggaaccaccaaggctcatgacaacttcttggtctccatgtatgtcttgactgaggctgaaggtggtcgtcgtactggattcggcgccaactaccgtcctcaagctttcatccgtactgccggtatgttccctttcaaagtcaattaatgagcgatttgctaacgagttatagatgaggctgctactctcagcttccccggtgacgatcagtccaagcaggtcatgcccggtgacaacgttgagatgatcttgaagacacaccgtcccgttgccgccgaagctggtcag

SEQ ID NO: 506 - DNA, 846 bp, Pichia anomala ATCC 18205
  misc_feature (1)...(846): n=a,t,c or g
tggtgctattattgttgttgctgcttctgatggtcaaatgcctcaaaccagagaacatttrttattggctagacaagttggtgttcaacacattgttgtctttgttaacaaagttgatactattgatgacccagaaatgttggaattagttgaaatggaaatgagagaattgttaagtacttatggttttgatggtgataacgtcccagttgttatgggttctgctttatgtgccttggaaggtcgtgaagaagaaattggtgtcaaagctattgataaattattagctgctgttgatgaatatatcccaaccccacaaagagatttagaaaaaccattcttgatgggtgttgaagatgtcttytcaatctcaggtagaggtaccgttgttactggtcgtgttgaacgtggtaacttgaagaaaggtgatgaagttgaaattgttggtttaaacaaaactccattgaaaactactgtyacnggtattgaaatgttcaaaaaagaattggaccaagctatggctggtgataactgtggtatcttattacgtggtatcaaaagagatgacatyaaaagaggtatggttattgctaaaaccggtaccatctcwgctcacactaaattcttagcctcaatgtatattttgactaaagaagaaggtggtcgtcactcaggttttggtgaacattacagacctcaattattcatcagaactggtgatgttaccgttgttttaaccttyccagaaggtggtgattcatctcaacaaatcttaccaggtgacaatgtcgaaatggtttgtgaattggttcacccaactgctttagaagctggtcaaagattcaa

SEQ ID NO: 507 - DNA, 964 bp, Trichophyton mentagrophytes strain WSA-225
ggagctgttgtcgttgtcgcagcttctgacggtcaaatgtaattgaatgcccgcccagacggatgaaaggatttgacgtttctaacatcagtctaggcctcagaccagagaacatttgctccttgcccgccaggtcggtgtccagaagctggtcgttttcgttaacaaggtcgatgccgttgaggacccagagatgttggagcttgtcgaacttgaaatgcgtgaactcctcagccactacagttttgagggtgaggagacccccatcatttttggctctgctctctgtgccctcgagtcccgtcgacctgagcttggtgtcgagaagattgacgagctattgaacgccgtcgacacctggatccccacccccgagcgcgccactgataagcctttcctcatgtccattgaggaagtgttctctatctctggtcgtggtaccgtcgtctccggtcgtgttgagcgtggtatcctcaagaaggattccgacgtcgaaattgttggtggctctaccacccctatcaagaccaaggtcacagatatcgaaaccttcaagaagtcctgcgatgaatctcgagctggtgacaactctggtctccttctccgaggtatcaagcgtgaggacttgaagcgtggaatggttgttgctgcccccggatccaccaaggctcacaccgacttcatggtctccctctacgtcctgactgaggctgagggtggtcgttccaacggcttcacccacaagtaccgccctcaaatgttcatccgtactgctggtatgtaaccaaagtttccgctatttactaagtagatcattgctaacttgtattcccttccgtagacgaagccgcatctttcagctggcctggagaagaccaagacaagaaggctatgcctggtgacaacgtcgagatgatttgcaaaaccctccaccccattgctgccgaggctggccaacgattca

SEQ ID NO: 508 - DNA, 844 bp, Yarrowia lipolytica ATCC 38295
ggtgctatcattgtcgttgctgctggagacggttccaagccccagacccgagagcatctgctgcttgctcgacaggtcggtgtccagaacctggttgtgtttgttaacaaggttgatcagattgatgataaggagattcttgagctcgttgacatggagatgcgagatctgctgacccagtacggttttgatggtgacaacacccccgttgtcatgggctctgctctgtgcgctcttgagggcaagcagaaggatattggagaggacgccatcatggcccttatggatgccgttgatgagcacatccctacccctaaccgtgaccttgagaagcccttcctgatgcccgttgaggacgttttctccatctctggccgaggaactgttgttactggccgagtcgagcgaggaaacctgaagaagggtgaggaaatcgagattgttggctacaacaacaagcccatcaaggctgttgttaccggtattgagatgttcaagaaggagctcgagtccgccatggccggtgacaacgccggtatcctgctccgaggtatcaagcgagacgagatcaagcgaggtatggtcatgtgcaagcctggcaccgtcaacgcccacaccaagttccttgcttctctttacatcatccccaccgaggagggtggtcgaaccagctctttcggcgccaactaccgaccccagatgttcatccgaacttcttccgtcaccgccactctcaccttccccgagggtaccgacgagtcccagaccgtcaaccccggtgacaacactgagatggttctcgagcttgttcaccctaccgccattgaggtcaaccagcgattca

SEQ ID NO: 509 - DNA, 1067 bp, Babesia bigemina strain Suarez-2
cttggacaagctgaagagcgagcgtgagcgtggtatcaccattgacattaccctgtggaagttcgaaactggcaagtactactacaccgtcattgacgcccccggtcaccgtgacttcattaagaacatgattacgggtacctcccaggccgatgttgctatgcttgtcgtgcccgccgaggctggtggtttcgaagctgccttctctaaggaaggtcagacccgtgagcacgctcttttggccttcacccttggtgtcaagcagatcatttgcgccatcaacaagatggacaagtgcgactacaaggaggaccgttacagcgaaatccagaaggaagttcagggttacctgaagaaggtcggttacaacatcgagaaggtgcctttcgtcgccatctccggtttcatgggtgacaacatggttgagcgctccaccaacatgccgtggtacaagggcaagaccttggtcgaggccctcgacatgatggagcccccgaagaggcccgtcgacaagcccctgcgtcttcccctccagggtgtgtacaagatcggtggtatcggtaccgtccctgtcggtcgtgtggagactggtcagctcaaggccggtatggtcctcaccttcgcccccaacccgatcactactgagtgcaaatccgtcgaaatgcaccacgaagttatcgatgttgccagccctggtgacaacgttggtttcaacgtgaagaacgtgtccacctctgacatccgcactggtcacgtcgcttctgactccaagaacgaccccgccaaggccgccgtgtccttcaccgcccaggtcatcatcttgaaccaccctggtaccatcaaggccggttactcccctgtggttgactgccacactgcccacatctcgtgcaaattcgacgagatcaccagccgtatggacaagcgtaccggtaaggcccttgaggagaaccccaagaccatcaagaacggcgacgccgctatggtcgtcctgaagccgtgcaagcccatggtcgtcgaggccttcactgaatacgctccccttggtcgtttcgccgtgcgtgacg

SEQ ID NO: 510 - DNA, 1049 bp, Babesia bovis strain Suarez-3
gtgaacgtgaacgtggtattactattgatattaccttatggaagttcgagaccaccaagtactactacaccgtcattgatgcccctggtcaccgtgacttcatcaagaacatgattacgggtacttctcaagccgatgttgctatgcttgttgtaccagctgaggctggtggtttcgaggccgctttctccaaggaaggacagacccgtgagcacgctcttttggctttcacccttggtgtcaaacagatcatctgtgccattaacaagatggacaagtgcgactacaaggaggaccgttacagtgaaatccagaaggaagtccagggttacctcaagaaggtcggttacaatattgagaaggtgcccttcgttgccatctccggtttcatgggagacaacatggttgagcgttccaccaacatgccctggtataagggaaagacattggtcgaggcccttgatcagatggaacccccaaagaggcccgttgacaagccacttcgtcttcccctccagggtgtctacaagatcggtggtatcggtaccgtccccgtcggtcgtgttgaaactggtatgttgaaggctggtatgattctaacctttgctcctaacccaatcaccactgaatgcaaatccgttgaaatgcaccacgaaaccgttgaggttgcttaccccggtgacaacgtcggtttcaacgtaaagaacgtttctacttctgacattcgcagtggtcacgttgcctctgattctaagaacgaccctgccaaggctgctgtttccttcactgcccaggtcattgtgctcaaccaccctggtaccattaaggccggttactgccccgtcgtcgattgccacaccgctcacatttcatgtaaattcgaagagatcaccagccgtatggacaagcgtaccggtaaatctcttgaggaaaaccccaagaccatcaagaacggtgacgctgccatggttgtgctcaagccaatgaagcccatggttgtcgaatccttcactgagtatgctcctcttggtcgtttcgctgttcgtgac

SEQ ID NO: 511 - DNA, 1070 bp, Crithidia fasciculata ATCC 11745
tggacaagctgaaggcggagcgcgagcgcggtatcacgatcgatattgccctgtggaagttcgagtcgcccaagtccgtgttcacgatcatcgatgcccccggccaccgcgacttcatcaagaacatgatcaccggcacctcccaggccgatgccgccattctgatgattgactcgacccagggtggcttcgaggctggcatctccaaggacggccagacccgcgagcacgccctgcttgccttcacgctgggcgtgaagcagatggttgtgtgctgcaacaagatggacgacaagacggtgcagtacgcccaggcccgctacgaggagatcagcaaggaggtcggcgcgtacctgaagcgcgtgggctacaacccggagaaggtgcgcttcatcccgatctcgggctggcagggcgacaacatgatcgagaagtccgacaacatgtcgtggtacaagggtcccacgctgctggaggcgctcgacctgctggaggcccccgtgcgtccggtggacaagccgctgcgcctgcccctgcaggacgtgtacaagatcggcggtatcggcactgtgcccgtgggccgtgtggagaccggcgtgatgaagccgggcgacgttgtggtgttcgcgcctgccaacgtgacgaccgaggtgaagtcgatcgagatgcaccacgagcagctggctgaggccgtgcccggcgacaacgtgggcttcaacgtgaagaacgtgtccgtgaaggatatccgccgtggtaacgtgtgcggcaacacgaagagcgaccccccgaaggaggcggccgacttcactgcccaggtgatcgtgctgaaccaccccggccagatcagcaacggctacgcgccggtgctggactgccacacgagccacatcgcgtgcaagttcgcggacatcgagtccaagatcgaccgccgctctggcaaggagctggagaagagcccgaaggccatcaagtccggcgatgcggccatcgtgaagatgatcccgcagaagccgatgtgcgtggaggtgttcaacgactacccgccgctgggccgcttcgctgtccgcgat

SEQ ID NO: 512 - DNA, 1052 bp, Entamoeba histolytica strain HM1-IMMS
gctgaaagagaaagaggaattactattgatatttcattatggaaattcgaaacatctaaatactacttcactattattgatgccccaggtcayagagatttcattaagaacatgattactggaacttcacaagctgatgttgccatccttattgttgctgctggtactggwgaatttgaagctggtatttcaaagaatggacaaaccagagaacayattcttctttcatacactcttggagttaaacaaatgattgttggwgttaacaagatggatgctattcaatataaacaagaaagatatgaagaaattaagaaagaaattagtgcattccttaagaagacwggatataatccagacaagattccatttgtcccaatttcaggattccaaggagataatatgattgaaccatcaaccaacatgccatggtacaaaggaccaacattaattggagcacttgattcagtcacaccaccagaaagaccagttgataaaccacttagacttccacttcaagatgtttayaagatttcaggtattggaactgtaccatgtggaagagttgaaactggagttcttagaccaggaactattgttcaatttgcaccatcaggagtttcatctgaatgtaaatcagttgaaatgcatcacacagcacttgctcaagctattccaggtgataatgttggattcaatgttagaaayttaacagttaaagatattaagagaggaaatgtagcatcagatgctaagaatcaaccagctgttggatgtgaagatttcactgctcaagtcattgtcatgaaccatccaggacaaattagaaagggatatacaccagttcttgattgccatacatcacacattgcatgtaaattcgaagaattattaagcaagattgatagaagaacaggtaaatccatggaaggaggagaaccagaatatattaagaatggagattcagcacttgttaagattgttccaactaaaccactttgtgttgaagaatttgctaaattcccaccattgggaagatttgctgttagaga

SEQ ID NO: 513 - DNA, 1082 bp, Giardia lamblia strain Faubert-1
gacgagcgcgagcgcgggatcacgatcaacatcgcgctctggaagttcgagacgaagaagtacatcgtcacgatcatcgacgccccgggccaccgcgacttcatcaagaacatgatcacggggacgtcccaggccgacgtcgcgatcctcgtcgtcgcggcgggccagggcgagttcgaggccgggatctcgaaggacggccagacgcgcgagcacgcgacccttgcgaacacgctcgggatcaagacgatgatcatctgcgtcaacaagatggacgacggccaggtcaagtactcgaaggagcgctacgacgagatcaagggcgagatgatgaagcagctcaagaacatcggctggaagaaggccgaggagttcgactacatcccgacgtccggctggaccggggacaacatcatggagaagtccgacaagatgccctggtacgagggcccgtgcctgatcgacgcgatcgacgggctcaaggccccgaagcgcccgaccgacaagcccctccgcctcccgatccaggacgtctacaagatctcgggcgtcgggaccgtccccgcgggccgcgtcgagacgggcgagctcgcgcccgggatgaaggtcgtcttcgccccgacgtcccaggtctcggaggtcaagtccgtcgagatgcaccacgaggagctcaagaaggccgggcccggggacaacgtcggcttcaacgtccgcgggctcgccgtcaaggacctcaagaagggctacgtcgtcggggacgtgacgaacgacccgcccgtcggctgcaagagcttcaccgcccaggtcatcgtcatgaaccacccgaagaagatccagcccggctacacgcccgtcatcgactgccacaccgcgcacatcgcgtgccagttccagctcttcctccagaagctcgacaagcgcacgctcaagcccgagatggagaacccgcccgacgcaggccgcggcgattgcatcatcgtcaagatggtcccccagaagcccctgtgctgcgagacgttcaacgactacgcgcccctcggccgcttcgccgtccgcgacatgcgccaaaccgttgccgtcgg

SEQ ID NO: 514 - DNA, 1098 bp, Leishmania tropica ATCC 30816
acgcgtgggtgctcgacaagctgaaggcggagcgcgagcgcggcatcacgatcgacattgcgctgtggaagttcgagtcgcccaagtccgtgttcacgatcatcgatgcgcccggccaccgcgacttcatcaagaacatgatcacgggcacgtcgcaggcggacgccgccatcctgatgatcgactcgacgcatggtggcttcgaggctggcatctcgaaggacggccagacccgcgagcacgcgctgcttgccttcactcttggcgtgaagcagatggtggtgtgctgcaacaagatggacgacaagacggtgacgtacgcgcagtcgcgctacgatgagatcagcaaggaggtgggcgcgtacctgaagcgcgtgggctacaacccggagaaggtgcgcttcatcccgatctcgggctggcagggcgacaacatgatcgagaagtcggacaacatgccgtggtacaagggtcccacgctgctggacgcgctcgacatgctggagccgccggtgcgcccggtggacaagccgctgcgcctgcccctgcaggacgtgtacaagatcggcggtatcgggacggtgcccgtggggcgcgtggagaccggcatcatgaagccgggcgacgtggtgacgttcgcgcccgccaacgtgacgactgaggtgaagtcgatcgagatgcaccacgagcagctggcggaggcgcagcccggcgacaacgtcggcttcaacgtgaagaacgtgtcggtgaaggacatccgccgtggtaacgtgtgcggcaactcgaagaacgacccgccgaaggaggcggccgacttcacggcgcaggtgatcgtgctgaaccaccccggccagatcagcaacggctacgcgccggtgctggactgccacacgagccacattgcgtgccgcttcgcggaaatcgagtccaagatcgaccgccgctccggcaaggagctggagaagaaccccaaggcgatcaagtctggcgatgccgcgatcgtgaagatggtgccgcagaagccgatgtgcgtggaggtgttcaacgactacgcgccgctgggccgctttgccgtgcgcgacatgcgccaaaccgttg

SEQ ID NO: 515 - DNA, 1104 bp, Leishmania aethiopica ATCC 50119
tacgcgtgggtgctcgacaagctgaaggcggagcgcgagcgcggcatcacgatcgacattgcgctgtggaagttcgagtcgcccaagtccgtgttcacgatcatcgatgcgcccggccaccgcgacttcatcaagaacatgatcacgggcacgtcgcaggcggacgccgccatcctgatgatcgactcgacgcatggtggcttcgaggctggcatctcgaaggacggccagacccgcgagcacgcgctgcttgccttcactcttggcgtgaagcagatggtggtgtgctgcaacaagatggacgacaagacggtgacgtacgcgcagtcgcgctacgaggagatcagcaaggaggtgggcgcgtacctgaagcgcgtgggctacaacccggagaaggtgcgcttcatcccgatctcgggctggcagggcgacaacatgatcgagaagtcggacaacatgccgtggtacaagggtcccacgctgctggacgcgctcgacatgctggagccgccggtgcgcccggtggacaagccgctgcgcctgcccctgcaggacgtgtacaagatcggcggtatcgggacggtgcccgtgggccgcgtggagaccggcatcatgaagccgggcgacgtggtgacgttcgcgcccgccaacgtgacgactgaggtgaagtcgatcgagatgcaccacgagcagctggcggaggcgcagcccggcgacaacgtcggcttcaacgtgaagaacgtgtcggtgaaggacatccgccgtggcaacgtgtgcggcaactcgaagaacgacccgccgaaggaggcggccgacttcacggcgcaggtgatcgtgctgaaccaccccggccagatcagcaacggctacgcgccggtgctggactgccacacgagccacattgcgtgccgcttcgcggaaatcgagtccaagatcgaccgccgctccggcaaggagctggagaagaaccccaaggcgatcaagtctggcgatgccgcgatcgtgaagatggtgccgcagaagccgatgtgcgtggaggtgttcaacgactacgcgccgctgggccgctttgccgtgcgcgacatgcgccaaaccgttgccgtc

SEQ ID NO: 516 - DNA, 1106 bp, Leishmania tropica ATCC 30815
tacgcgtgggtgctcgacaagctgaaggcggagcgcgagcgcggcatcacgatcgacattgcgctgtggaagttcgagtcgcccaagtccgtgttcacgatcatcgatgcgcccggccaccgcgacttcatcaagaacatgatcacgggcacgtcgcaggcggacgccgccatcctgatgatcgactcgacgcatggtggcttcgaggctggcatctcgaaggacggccagacccgcgagcacgcgctgcttgccttcackcttggcgtgaagcagatggtggtgtgctgcaacaagatggacgacaagacggtgacgtacgcgcagtcgcgctacgatgagatcagcaaggaggtgggcgcgtacctgaagcgcgtgggctacaacccggagaaggtgcgcttcatcccgatctcgggctggcagggcgacaacatgatcgagaagtcggacaacatgccgtggtacaagggtcccacgctgctggacgcgctcgacatgctggagccgccggtgcgcccggtggacaagccgctgcgcctgcccctgcaggacgtgtacaagatcggcggtatcgggacggtgcccgtggggcgcgtggagaccggcatcatgaagccgggcgacgtggtgacgttcgcgcccgccaacgtgacgactgaggtgaagtcgatcgagatgcaccacgagcagctggcggaggcgcagcccggcgacaacgtcggcttcaacgtgaagaacgtgtcggtgaaggacatccgccgtggtaacgtgtgcggcaactcgaagaacgacccgccgaaggaggcggccgacttcacggcgcaggtgatcgtgctgaaccaccccggccagatcagcaacggctacgcgccggtgctggactgccacacgagccacattgcgtgccgcttcgcggaaatcgagtccaagatcgaccgccgctccggcaaggagctggagaagaaccccaaggcgatcaagtctggcgatgccgcgatcgtgaagatggtgccgcagaagccgatgtgcgtggaggtgttcaacgactacgcgccgctgggccgctttgccgtgcgcgacatgcgccaaaccgttgccgtcgg

SEQ ID NO: 517 - DNA, 1099 bp, Leishmania donovani ATCC 50212
tacgcgtgggtgctcgacaagctgaaggcggagcgcgagcgcggcatcacgatcgacattgcgctgtggaagttcgagtcgcccaagtccgtgttcacgatcatcgatgcgcccggccaccgcgacttcatcaagaacatgatcacgggcacgtcgcaggcggacgccgccatcctgatgatcgactcgacgcatggtggcttcgaggctggcatctcgaaggacggccagacccgcgagcacgcgctgcttgccttcacgcttggcgtgaagcagatggtggtgtgctgcaacaagatggacgacaagaccgtgacgtacgcgcagtcgcgctacgatgagatcagcaaggaggtgggcgcgtacctgaagcgcgtgggctacaacccggagaaggtgcgcttcatcccgatctcgggctggcagggcgacaacatgatcgagaggtcggacaacatgccgtggtacaagggtcccacgctgctggacgcgctcgacatgctggagccgccggtgcgcccggtggacaagccgctgcgcctgcccctgcaggacgtgtacaagatcggcggtatcgggactgtgcccgtgggccgcgtggagaccggcatcatgaagccgggcgacgtggtgacgttcgcgcccgccaacgtgacgactgaggtgaagtcgatcgagatgcaccacgagcagctggcggaggcgcagcccggcgacaacgtcggcttcaacgtgaagaacgtgtcggtgaaggacatccgccgtggcaacgtgtgcggcaactcgaagaacgacccgccgaaggaggcggccgacttcacggcgcaggtgatcgtgctgaaccaccccggccagatcagcaacggctacgcgccggtgctggactgccacacgagccacattgcgtgccgcttcgcggaaatcgagtccaagatcgaccgccgctccggcaaggagctggagaagaaccccaaggcgatcaagtctggcgatgccgcgatcgtgaagatggtgccgcagaagccgatgtgcgtggaggtgttcaacgactacgcgccgctgggccgctttgccgtgcgcgacatgcgccaaaccgttg

SEQ ID NO: 518 - DNA, 1098 bp, Leishmania infantum strain MOU
tacgcgtgggtgctcgacaagctgaaggcggagcgcgagcgcggcatcacgatcgacattgcgctgtggaagttcgagtcgcccaagtccgtgttcacgatcatcgatgcgcccggccaccgcgacttcatcaagaacatgatcacgggcacgtcgcaggcggacgccgccatcctgatgatcgactcgacgcatggtggcttcgaggctggcatctcgaaggacggccagacccgcgagcacgcgctgcttgccttcacgcttggcgtgaagcagatggtggtgtgctgcaacaagatggacgacaagaccgtgacgtacgcgcagtcgcgctacgatgagatcagcaaggaggtgggcgcgtacctgaagcgcgtgggctacaacccggagaaggtgcgcttcatcccgatctcgggctggcagggcgacaacatgatcgagaggtcggacaacatgccgtggtacaagggtcccacgctgctggacgcgctcgacatgctggagccgccggtgcgcccggtggacaagccgctgcgcctgcccctgcaggacgtgtacaagatcggcggtatcgggactgtgcccgtgggccgcgtggagaccggcatcatgaagccgggcgacgtggtgacgttcgcgcccgccaacgtgacgactgaggtgaagtcgatcgagatgcaccacgagcagctggcggaggcgcagcccggcgacaacgtcggcttcaacgtgaagaacgtgtcggtgaaggacatccgccgtggcaacgtgtgcggcaactcgaagaacgacccgccgaaggaggcggccgacttcacggcgcaggtgatcgtgctgaaccaccccggccagatcagcaacggctacgcgccggtgctggactgccacacgagccacattgcgtgccgcttcgcggaaatcgagtccaagatcgaccgccgctccggcaaggagctggagaagaaccccaaggcgatcaagtctggcgatgccgcgatcgtgaagatggtgccgcagaagccgatgtgcgtggaggtgttcaacgactacgcgccgctgggccgctttgccgtgcgcgacatgcgccaaaccgtt

SEQ ID NO: 519 - DNA, 1071 bp, Leishmania enriettii ATCC 50120
ctcgacaagctgaaggcggagcgcgagcgcggcatcacgatcgacattgcgctgtggaagttcgagtcgcccaagtctgtgttcacgatcatcgatgcgcccggccaccgcgacttcatcaagaacatgatcaccggcacgtcgcaggccgacgccgccatcctgatgatcgactcgacccagggcggcttcgaggctggcatctcgaaggacggccagacccgcgagcacgcgctgctcgccttcacgcttggtgtgaagcagatggtggtgtgctgcaacaagatggacgacaagacggtgcagtactcgcaggcgcgctacgaggagatcagcaaggaggtgggcgcgtacctgaagcgcgtcggctacaacccggagaaggtgcgcttcatcccgatctcgggctggcagggcgacaacatgatcgacaagtcggacagcatgccgtggtacaaggggcccacgctgctggacgcgctcgacatgctggaggcgccggtgcgcccggtggacaagccgctgcgcctgcccctgcaggacgtgtacaagatcggcggtatcgggacggtgcccgtgggccgcgtggagaccggcatcatgaagcctggcgacgtggtgacgtttgcgcccgccaacgtgacgacggaggtgaagtcgatcgagatgcaccacgagcagctggcggaggcggtgcccggcgacaacgtcggcttcaacgtgaagaacgtgtcggtgaaggacatccgccgtggtaacgtgtgcggcaactcgaagaacgacccgccgaaggaggcggccgacttcacggcgcaggtgatcgtgctgaaccaccctggccagatcagcaacggctacgcgccggtgctggactgccacacgagccacatcgcgtgccgcttcgcggatatcgagtccaagatcgaccgccgctctggcaaggagctggagaagaaccccaaggcgatcaagtccggcgatgcggccatcgtgaagatggtgccgcagaagccgatgtgcgtggaggtgttcaacgactacccgccgctggggcgcttcgctgtgcgcgac

SEQ ID NO: 520 - DNA, 1071 bp, Leishmania gerbilli ATCC 50121
ctcgacaagctgaaggcggagcgcgagcgcggcatcacgatcgacattgcgctgtggaagttcgagtcgcccaagtccgtgttcacgatcatcgatgcgcccggccaccgcgacttcatcaagaacatgatcacgggcacgtcgcaggcggacgccgccatcctgatgatcgactcgacgcatggtggcttcgaggctggcatctcgaaggacggccagacccgcgagcacgcgctgcttgccttcactcttggcgtgaagcagatggtggtgtgctgcaacaagatggacgacaagacggtgacgtacgcgcagtcgcgctacgatgagatcagcaaggaggtgggcgcgtacctgaagcgcgtgggctacaacccggagaaggtgcgcttcatcccgatctcgggctggcagggcgacaacatgatcgagaagtcggacaacatgccgtggtacaagggtcccacgctgctggacgcgctcgacatgctggagccgccggtgcgcccggtggacaagccgctgcgcctgcccctgcaggacgtgtacaagatcggcggtatcgggacggtgcccgtgggccgcgtggagaccggcatcatgaagccgggcgacgtggtgacgttcgcgcccgccaacgtgacgactgaggtgaagtcgatcgagatgcaccacgagcagctggcggaggcgcagcccggcgacaacgtcggcttcaacgtgaagaacgtgtcggtgaaggacatccgccgtggtaacgtgtgcggcaactcgaagaacgacccgccgaaggaggcggccgacttcacggcgcaggtgatcgtgctgaaccaccccggccagatcagcaacggctatgcgccggtgctggactgccacacgagccacattgcgtgccgcttcgcggaaatcgagtccaagatcgaccgccgctccggcaaggagctggagaagaaccccaaggcgatcaagtctggcgatgccgcgatcgtgaagatggtgccgcagaagccgatgtgcgtggaggtgttcaacgactacgcgccgctgggccgctttgccgtgcgcgac

SEQ ID NO: 521 - DNA, 1114 bp, Leishmania hertigi ATCC 50125
tcgttcaagtacgcgtgggtgctcgacaagctgaaggcggagcgcgagcgcggtatcacgatcgacattgcgctgtggaagttcgagtcgcccaagtcggtgttcacgatcatcgatgcgcccggccaccgcgacttcatcaagaacatgatcaccggcacgtcgcaggcggatgctgccattctgatgatcgattcgacgcagggtggcttcgaggctggcatctcgaaggacggccagacgcgcgagcacgcgctgctggccttcacgctgggcgtgaagcagatggttgtgtgctgcaacaagatggacgacaagacggtgcagtacgcgcaggcgcgctacgaggagatcagcaaggaggtgggcgcgtacctgaagcgcgtgggctacaacccggagaaggtgcgcttcatcccgatctcgggctggcagggcgacaacatgatcgagaagtccgacaacatgtcgtggtacaagggtcccacgctgctggaggcgctggacatgctggaggcgccggtgcgcccggtggacaagccgctgcgcctgcccctgcaggacgtgtacaagatcggcggcattggcacggtgccggtgggccgtgtggagaccggcatcatgaagcccggcgacgtggtgacgttcgcgcccgccaacgtgacgacggaggtgaagtcgatcgagatgcaccacgagcagctgcaggaggctgtgcccggcgacaacgtcggcttcaacgtgaagaacgtgtcggtgaaggacatccgccgtggtaacgtgtgtggcaactcgaagaacgacccgccgaaggaggcggctgacttcacggcgcaggtgatcgtgctgaaccaccccggccagatcagcaacggctacgcgccggtgctggactgccacaccagccacatcgcgtgccgcttcgcggacatcgagtcgaagatcgaccgccgctccggcaaggagctggagaagaaccccaagtccatcaagtccggcgacgccgccatcgtgaagatggtgccgcagaagccgatgtgcgtggaggtgttcaacgactacccgccgctgggccgctttgcggtgcgcgacatgcgccaaaccgttgccgtcg

SEQ ID NO: 522 - DNA, 1106 bp, Leishmania major ATCC 50122
tacgcgtgggtgctcgacaagctgaaggcggagcgcgagcgcggcatcacgatcgacattgcgctgtggaagttcgagtcgcccaagtccgtgttcacgatcatcgatgcgcccggccaccgcgacttcatcaagaacatgatcacgggcacgtcgcaggcggacgccgccattctgatgatcgactcgacgcatggcggcttcgaggctggcatctcgaaggacggccagacccgcgagcacgcgctgcttgccttcactcttggcgtgaagcagatggtggtgtgctgcaacaagatggacgacaagacggtgacgtacgcgcagtcrcgctacgatgagatcagcaaggaggtgggcgcgtacctgaagcgcgtgggctacaacccggagaaggtgcgcttcatcccgatctcgggctggcagggcgacaacatgatcgagaagtcggacaacatgccgtggtacaagggtcccacgctgctggacgcgctcgacatgctggagccgccggtgcgcccggtggacaagccgctgcgcctgcccctgcaggacgtgtacaagatcggcggtatcgggacggtgcccgtgggccgcgtggagaccggcatcatgaagccgggcgacgtggtgacgttcgcgcccgccaacgtgacgactgaggtgaagtcgatcgagatgcaccacgagcagctggcggaggcgcagcccggcgacaacgtcggcttcaacgtgaagaacgtgtcggtgaaggacatccgccgtggtaacgtgtgcggcaactcgaagaacgacccgccgaaggaggcggccgacttcacggcgcaggtgatcgtgctgaaccaccccggccagatcagcaacggctatgcgccggtgctggactgccacacgagccacattgcgtgccgcttcgcggaaatcgagtccaagatcgaccgccgctccggcaaggagctggagaagaaccccaaggcgatcaagtctggcgatgccgcgatcgtgaagatggtgccgcagaagccgatgtgcgtggaggtgttcaacgactacgcgccgctgggccgctttgccgtgcgcgacatgcgccaaaccgttgccgtcgg

SEQ ID NO: 523 - DNA, 1105 bp, Leishmania amazonensis ATCC 50131
tacgcgtgggtgctcgacaagctgaaggcggagcgcgagcgcggcatcacgatcgacattgcgctgtggaagttcgagtcgccgaagtccgtgttcacgatcatcgatgcgcccggccaccgcgacttcatcaagaacatgatcacgggcacgtcgcaggcggacgcggccatcctgatgatcgactcgacgcatggtggcttcgaggctggcatctcgaaggacggccagacccgcgagcacgcgctgcttgccttcactcttggcgtgaagcagatggtggtgtgctgcaacaagatggacgacaagacggtgatgtacgcgcagtcgcgctacgatgagatcagcaaggaggtgagcgcgtacctgaagcgcgtgggctacaacccggagaaggtgcgcttcatcccgatctcggggtggcagggcgacaacatgatcgacaagtcggacaacatgccgtggtacaagggtcccacgctgctggacgcgctcgacatgctggagccgccggtgcgcccggtggacaagccgctgcgcctgcccctgcaggacgtgtacaagatcggcggtatcgggacggtgcccgtgggccgcgtggagaccgggatcatgaagccgggcgacgtggtgacgttcgcgcccgccaacgtgacgactgaggtgaagtcgatcgagatgcaccacgagcagctggcggaggcgcagcccggcgacaacgtcggcttcaacgtgaagaacgtgtcggtgaaggacatccgccgtggtaacgtgtgcggcaactcgaagaacgacccgccgaaggaggcggccgacttcacggcgcaggtgatcgtgctgaaccaccccggccagatcagcaacggctacgcgccggtgctggactgccacacgagccacatcgcgtgccgcttcgcggagatcgagtccaagatcgaccgccgctccggcaaggagctggagaagaaccccaaggcgatcaagtctggcgacgccgcgatcgtgaagatggtgccgcagaagccgatgtgcgtggaggtgttcaacgactacgcgccgctgggccgctttgccgtgcgcgacatgcgccaaaccgttgccgtcg

SEQ ID NO: 524 - DNA, 1098 bp, Leishmania mexicana ATCC 50156
tacgcgtgggtgctcgacaagctgaaggcggagcgcgagcgcggcatcacgatcgacattgcgctgtggaagttcgagtcgccgaagtccgtgttcacgatcatcgatgcgcccggccaccgcgacttcatcaagaacatgatcacgggcacgtcgcaggcggacgcggccatcctgatgatcgactcgacgcatggtggcttcgaggctggcatctcgaaggacggccagacccgcgagcacgcgctgcttgccttcactcttggcgtgaagcagatggtggtgtgctgcaacaagatggacgacaagacggtgatgtacgcgcagtcgcgctacgatgagatcagcaaggaggtgagcgcgtacctgaagcgcgtgggctacaacccggagaaggtgcgcttcatcccgatctcggggtggcagggcgacaacatgatcgacaagtcggacaacatgccgtggtacaagggtcccacgctgctggacgcgctcgacatgctggagccgccggtgcgcccggtggacaagccgctgcgcctgcccctgcaggacgtgtacaagatcggcggtatcgggacggtgcccgtgggccgcgtggagaccgggatcatgaagccgggcgacgtggtgacgttcgcgcccgccaacgtgacgactgaggtgaagtcgatcgagatgcaccacgagcagctggcggaggcgcagcccggcgacaacgtcggcttcaacgtgaagaacgtgtcggtgaaggacatccgccgtggtaacgtgtgcggcaactcgaagaacgacccgccgaaggaggcggccgacttcacggcgcaggtgatcgtgctgaaccaccccggccagatcagcaacggctacgcgccggtgctggactgccacacgagccacatcgcgtgccgcttcgcggagatcgagtccaagatcgaccgccgctccggcaaggagctggagaagaaccccaaggcgatcaagtctggcgacgccgcgatcgtgaagatggtgccgcagaagccgatgtgcgtggaggtgttcaacgactacgcgccgctgggccgctttgccgtgcgcgacatgcgccaaaccgtt

SEQ ID NO: 525 - DNA, 1081 bp, Leishmania tarentolae strain II WT
gctgaaggcggagcgcgagcgcggcatcacgatcgacattgcgctgtggaagttcgagtcgcccaagtcggtgttcacgatcatcgatgcgcccggccaccgcgacttcatcaagaacatgatcacgggcacgtcgcaggcggacgcggccatcctgatgatcgactcgacgcacggtgggttcgaggctggcatctcgaaggacgggcagacgcgcgagcacgcgctgcttgccttcactcttggcgtgaagcagatggttgtgtgctgcaacaagatggacgacaagacggtgatgtacgcgcagtcgcgctacgatgagatcagcaaggaggtgggcgcgtacctgaagcgcgtgggctacaacccggagaaggtgcgcttcatcccgatctcgggctggcagggcgacaacatgatcgagaagtcggacaacatgccgtggtacaagggtcccacgctgctggacgcgctcgacatgctggaggcgccggtgcgcccggtggacaagccgctgcgcctgcccctgcaggacgtgtacaagatcggcggcatcggcacggtgcccgtgggccgcgtggagaccggcatcatgaagccgggcgacgtggtgacgttcgcgcccgcgaacgtgacgacggaggtgaagtcgatcgagatgcaccacgagcagctggcggaggcgcagcccggcgacaacgtcggcttcaacgtgaagaacgtgtcggtgaaggacatccgccgtgggaacgtgtgcggtaactcgaagaacgacccgccgaaggaggccgccgacttcacggcgcaggtgatcgtgctgaaccaccccggccagatcagcaacggctacgcgccggtgctggactgccacacgagccacatcgcgtgccggttcgcggacatcgagtccaagattgaccgccgctccggcaaggagctggagaagaaccccaaggcgatcaagtccggcgatgccgcgatcgtgaagatggtgccgcagaagccgatgtgcgtggagatgttcaacgactacgcgccgcttggccgctttgctgtgcgcgacatgcgccaaaccgttgcc

SEQ ID NO: 526 - DNA, 1102 bp, Leishmania tropica ATCC 50129
aaatacgcgtgggtgctcgacaagctgaaggcggagcgcgagcgcggcatcacgatcgacattgcgctgtggaagttcgagtcgcccaagtccgtgttcacgatcatcgatgcgcccggccaccgcgacttcatcaagaacatgatcacgggcacgtcgcaggcggacgccgccatcctgatgatcgactcgacgcatggtggcttcgaggctggcatctcgaaggacggccagacccgcgagcacgcgctgcttgccttcackcttggcgtgaagcagatggtggtgtgctgcaacaagatggacgacaagacggtgacgtacgcgcagtcgcgctacgatgagatcagcaaggaggtgggcgcgtacctgaagcgcgtgggctacaacccggagaaggtgcgcttcatcccgatctcgggctggcagggcgacaacatgatcgagaagtcggacaacatgccgtggtacaagggtcccacgctgctggacgcgctcgacatgctggagccgccggtgcgcccggtggacaagccgctgcgcctgcccctgcaggacgtgtacaagatcggcggtatcgggacggtgcccgtggggcgcgtggagaccggcatcatgaagccgggcgacgtggtgacgttcgcgcccgccaacgtgacgactgaggtgaagtcgatcgagatgcaccacgagcagctggcggaggcgcagcccggcgacaacgtcggcttcaacgtgaagaacgtgtcggtgaaggacatccgccgtggtaacgtgtgcggcaactcgaagaacgacccgccgaaggaggcggccgacttcacggcgcaggtgatcgtgctgaaccaccccggccagatcagcaacggctacgcgccggtgctggactgccacacgagccacattgcgtgccgcttcgcggaaatcgagtccaagatcgaccgccgctccggcaaggagctggagaagaaccccaaggcgatcaagtctggcgatgccgcgatcgtgaagatggtgccgcagaagccgatgtgcgtggaggtgttcaacgactacgcgccgctgggccgctttgccgtgcgcgacatgcgccaaaccgttg

SEQ ID NO: 527 - DNA, 1105 bp, Neospora caninum strain Suarez-4
  misc_feature (1)...(1105): n=a,t,c or g
ggacraacttaaagctgaacgtgagcgtggtatcaccattgatatctccctgtggaaatttgagaccagcaagtactatgttaccatcattgatgccccaggacacagagacttcatcaaaaacatgattacaggcacatcccaggctgactgtgctgtcctgattgttgctgctggtgttggtgaatttgaagccggtatctccaagaacgggcagacccgtgagcatgcccttntggcttacaccctgggtgtgaaacaactaattgttggcgttaacaaaakggattccactgagccaccctatagccaraagagatacgargaaattgttaaggaagtcagcmcctaynttaaaaaaattggytacaaccccgacacagtancatttgkgccaatttntggctggaatggtgacaacatgctgganccaagtgctaatatgccatggttcaagggatggaaagtcmcccgtaaggacggcaatgccagkggaaccmccctgcttgaagctytggattgcattytgccaccaayttgcccaactgacaaacccttgcgtttgcctytccaggatgtctataaaattggkggtattggtactgtccctgtgggtcgtgtggagactggtgttctcaaacctggcatggtggtcacctttgctccagtcaatgtaacaactgaagtgaagtctgtagaaatgcaccatgaagcattgagtgaagcccttcctggggacaatgtgggcttcaatgtcaagaacgtgtctgtcaaagatgtccgtcgtggcaatgtggctggtgacagcaaaaatgatccacccatggaagctgctggcttcacagctcaggtgattattttgaaccatccaggccaaatcagtgctggatatgcacctgtgctggattgtcacacagctcacattgcttgcaagtttgctgagctgaaggagaagattgatcgtcgttctgggaaaaagctggaagatggccctaaattcttgaaatctggtgacgctgccatcgttgatatggttcctggcaagcccatgtgtgtcgagagcttctctgattatcctcccctgggccgttttgctgtgcgtgac

SEQ ID NO: 528 - DNA, 935 bp, Trichomonas vaginalis ATCC 30001
gcacatcccaggctgatgctgctatccttgtcatcgactccacactcggtggyttcgaagccggtatcgctgaacaaggccagacacgtgaacacgctcttcttgccttcacactcggcatcaagcaggtcattgtcgccgtcaacaagatggatgacaagacagtcaactacaacaaggcycgtttcgacgaaatcacagccgaaatgacacgcatccttacaggcatcggctacaagccagaaatgttccgcttcgtcccaatctccggctgggctggcgacaacatgacagagaagtctccaaacatgccatggtacaatggcccataccttcttgaagccctcgattcccttcagccaccaaagcgcccattcgacaagccactccgtcttccactccaggatgtctacaagatcaacggtatcggtacagttccagtcggccgtgtcgaatccggcacaatgaagccaggcatgatcgttaacttcgccccatccacagttacagctgaagttaagtccatcgaaatgcaccacgaatcccttccagaggctcttccaggtgacaacatcggcttcaacgtcaagaacgtttccacagctgatgtcaagcgtggctacgtcgttggtgatacaaagcgtgacccaccagtcgaatgcgcttccttcacagctcaratgatcatctccaaccacccaggcaagatccacgccggctaccagccagttttcgactgccacacagctcacatcgcctgcaagttcgacaagctcatccagcgtatcgatcgtcgccacggcaagaaggctacagagaacccagaatacattcagaaggatgatgccgctatcgtcgaggttgtcccatccaagccactcgtcgtcgagtccttccaggagtacccaccactcggccgtttcgccatccgtgat

SEQ ID NO: 529 - DNA, 1065 bp, Trypanosoma brucei subsp. brucei strain EATRO795
aagctgaaggctgagcgcgaacgtggtatcacgatcgacattgcactgtggaaattcgagtcacccaagtctgtcttcactattattgatgctcctgggcaccgtgacttcatcaagaacatgatcaccggcacatcgcaagccgacgcagccatcctcatcattgcctctgcgcagggtgagttcgaggctggtatctccaaggatggacagacccgcgagcacgcgttgctggccttcactttgggtgtgaagcagatggttgtgtgctgcaacaagatggacgacaagactgtgaactacggacaggagcggtatgacgagattgtgaaggaggtgtctgcttacatcaagaaggttgggtacaacgtggagaaggtgcgcttcgtccccatctccggatggcagggcgacaacatgattgagaaatccgagaagatgccatggtacaagggtccaacgctcctggaggcactagacatgctggagccaccagtgcgtccgagcgacaagcccctgcgtctgccactgcaggacgtgtacaagatcggtggtattggcaccgtgcccgttggtcgtgtggagaccggcgtgatgaagcctggtgatgtggtgacgtttgcccccgccaacgtgacgaccgaggtgaaatcgatcgagatgcaccacgagcagctcgctgaggcgacccccggtgacaacgtcggctttaacgtgaagaacgtttctgtaaaggacatccgccgtggcaacgtctgcggtaacaccaagaacgaccccccaaaggaggccgccgacttcacggcacaggtgatcatcctgaaccaccccggacagattggaaacggttatgcgcccgtgctggactgccacacatcgcacattgcctgcaagttcgcggagatcgagtcgaagatcgaccgtcgctctggcaaggagctggagaaggctcccaagtcgatcaagtctggcgacgccgcgatcgtgcgcatggtgccgcagaagcctatgtgcgtggaggtcttcaacgactacgcgccactcggccgctttgccgtgcgtgac

SEQ ID NO: 530 - DNA, 1297 bp, Crithidia fasciculata ATCC 11745
ttcgcggagggcgtgccgccggtgctgacggcgctggacgtgacggaggacctcggccgcgacgagccgctgacgctggagattgtgcagcacttggacgcgaacaccggccgctgcattgccatgcagacgacggatctgctgaagctgaagtcgaaggttgtgtcgacgggcggcaacatctccgtgccggttggccgcgagacgctgggccgcatcttcaacgtgctcggcgacgcgatcgaccagcgcggtgtggtgggcgagaagatgcgcatgccgatccacgccgaggcgccgaagctggcggaccaggccgcggaggacgcgattctgacgaccggcatcaaggtgatcgacctgattctgccgtactgcaagggtggcaagatcgggctgttcggcggtgctggtgtgggcaagactgtgatcatcatggagctgatcaacaacgtggccaagggccacggtggtttctccgtgttcgccggcgttggcgagcgcacccgcgagggcacggatctgtacctggagatgatgcagtcgaaggtcattgacctgaagggcgagtcgaagtgcgtgctggtgtacggccagatgaacgagcccccgggtgcgcgtgcgcgtgttgcgcagtctgcgctgacgatggcggagtacttccgtgacgtggagggccagaacgtgctgctgttcatcgacaacatcttccgcttcacccaggccaactccgaggtgtccgccctgctgggccgcattcccgccgccgtgggctaccagccgacgcttgccgaggatcttggtatgctgcaggagcgcattacgtcgacgacgaagggctcgattacgtctgtgcaggccgtgtacgtgccggccgatgatatcacggatccggcgccggcgacgaccttctcgcacctggatgcgacgacggtgctggaccgcgcggttgccgagtctggcatctaccccgccgtgaacccgctggagtgcgcgtcgcgtatcatggaccccgatgtgatcgacgtggaccactacaacgttgcgcaggatatcgtgcagatgctgaccaagtacaaggagctgcaggatatcattgccgtgctgggtatcgacgagctgagcgaggaggacaagcttgtggtggaccgcgctcgcaaggtgacgcgcttcctgtcgcagccgttccaggtggccgaggtgttcaccggcatgacgggccactacgtgcagctggaggacacagtggagtcgttctctggcctgctgatgggctcgtacgaccagatcccggaga

SEQ ID NO: 531 - DNA, 1298 bp, Leishmania tropica ATCC 30816
cttctcggagggcgtgccgcccgtgctgacggcgctggatgtgacggaggaccttggccgcgatgagccgctgacgctggagatcgtgcagcacttggacgcgaacacgggccgctgcattgcgatgcagacgacggacctgctgaagctgaagtcgaaggtcgtgtcgaccggcggcaacatctctgtgccggtgggccgtgagacgctgggccgcatcttcaaygttctgggcgacgcgatcgaccagcgcggccccgtgggcgagaagatgcgcatggcgatccacgccgaggccccgaagctggcggatcaggccgcggaggacacgatcctgacgaccggcatcaaggtgatcgacctgattctgccctactgcaagggtggcaagatcggcctgttcggcggtgccggtgtgggcaagactgtgatcatcatggagctgatcaacaacgtcgcgaagggccacggcggtttctccgtgtttgccggcgttggcgagcgcacgcgcgagggcacggacctgtacctggagatgatgcagtcgaaggtgattgacctgaagggcgagtcgaagtgygtgcttgtgtatgggcagatgaacgagcccccgggtgcgcgcgcgcgcgttgcgcagtctgcgctgacgatggcggagtacttccgcgacgtggagggccagaacgtgctgctgttcatcgacaacatcttccgcttcacgcaggcgaactccgaggtgtctgcgctgctgggccgcattccggccgccgtgggctaccagccgacgcttgcggaggatcttggtatgctgcaggagcgcatcacgtcgacaacgaaggggtcgatcacgtccgtgcaggccgtgtacgtgccagcggatgatatcacggatcccgcgcccgcgacgacgttctcgcacctggacgcgacgactgtgctggaccgcgcggtggcggagtcgggcatctaccctgccgtgaacccgctggagtgcgcgtcgcgtatcatggaccctgatgtgatcgatgtggaccactacaacgttgcgcaggatatcgtgcagatgctgaccaagtacaaggagctgcaggatatcattgcggtgcttggcatcgacgagctgagcgaggaagacaaggttgttgtggaccgcgcgcgcaaggtgacccggttcctgtcgcagccgttccaggttgcggaggtgttcacgggcatgacgggccactacgtgcagctggtcgacacggtggagtcgttctctggcctgctgatggggtcgtacgaccagatcccggaga

SEQ ID NO: 532 - DNA, 1297 bp, Leishmania aethiopica ATCC 50119
ttctcggagggcgtgccgcccgtgctgacggcgctggatgtgacggaggaccttggccgcgatgagccgctgacgctggagatcgtgcagcacttggacgcgaacaccggccgctgcattgcgatgcagacgacggacctgctgaagctgaagtcgaaggttgtgtcgaccggcggcaacatctctgtgccggtgggccgtgagacgctgggccgcatcttcaacgttctgggcgacgcgatcgaccagcgcggccccgtgggcgagaagatgcgcatggcgatccacgccgaggccccaaagctggcggatcaggccgcggaggacacgatcctgacgaccggcatcaaggtgatcgacctgattctgccctactgcaagggtggcaagatcggcctgttcggcggtgccggtgtgggcaagactgtgatcatcatggagctgatcaacaacgtcgcgaagggccacggtggtttctccgtgtttgccggcgttggcgagcgcacgcgcgagggcacggacctgtacctggagatgatgcagtcgaaggtgattgacctgaagggcgagtcgaagtgcgtgcttgtgtacgggcagatgaacgagcccccgggtgcgcgcgcgcgcgttgcgcagtctgcgctgacgatggcggagtacttccgcgacgtggagggccagaacgtgctgctgttcatcgacaacatcttccgcttcacgcaggcgaactccgaggtgtctgcgctgctgggccgcattccagccgccgtgggctaccagccgacgcttgcggaggatcttggtatgctgcaggagcgcatcacgtcgacaacgaaggggtcgatcacgtccgtgcaggccgtgtacgtgccagcggatgatatcacggatcccgcgcccgcgacgacgttctcgcacctggacgcgacgactgtgctggaccgcgcggtggcggagtcgggcatctaccctgccgtgaacccgctggagtgcgcgtcgcgtatcatggaccccgacgtgatcgatgtggaccactacaacgttgcgcaggatatcgtgcagatgctgaccaagtacaaggagctgcaggatatcattgcggtgcttggcatcgacgagctgagcgaggaagacaaggttgttgtggaccgcgcgcgcaaggtgacccggttcctgtcgcagccgttccaggttgcggaggtgttcacgggcatgacgggccactacgtgcagctggtcgacacggtggagtcgttctctggcctgctgatggggtcgtacgaccagatcccggaga

SEQ ID NO: 533 - DNA, 1298 bp, Leishmania donovani ATCC 50212
cttctcggagggcgtgccgcccgtactgacggcgctggatgtgacggaggaccttggccgcgatgagccgctgacgctggagatcgtgcagcacttggatgcgaacaccggccgctgcattgcgatgcagacgacggacctgctgaagctgaagtcgaaggttgtgtcgaccggcggcaacatctctgtgccggtgggccgtgagacgctgggccgcatcttcaacgttctgggcgacgcgatcgaccagcgcggccccgtgggcgagaagatgcgcatggcgatccacgccgaggccccgaagctggcggaccaggccgcggaggacacgatcctgacgaccggcatcaaggtgatcgacctcattctgccctactgcaagggcggcaagatcggcctgttcggcggtgccggtgtgggcaagactgtgatcatcatggagctgatcaacaacgtcgcgaagggccacggtggcttctccgtgtttgccggcgttggcgagcgcacgcgcgagggcacggacctatacctggagatgatgcagtcgaaggtgattgacctgaagggcgagtcgaagtgcgtgcttgtgtacgggcagatgaacgagcccccgggtgcgcgcgcgcgcgttgcgcagtctgcgctgacgatggcggagtacttccgcgacgtggagggccagaacgtgctgctgttcatcgacaacatcttccgcttcacgcaggcgaactccgaggtgtctgcgctgctgggccgcattccggccgccgtgggctaccagccgacgcttgccgaggatcttggtatgctgcaggagcgcatcacatcgacgacgaaggggtcgatcacgtccgtgcaggccgtgtacgtgccggcggatgatatcacggatcccgcgcccgcgacgacgttctcgcacctggacgcgacgactgtgctggaccgcgcggtggcggagtcgggcatctaccctgccgtgaacccgctggagtgcgcgtcgcgtatcatggaccccgatgtgatcgatgtggaccactacaacgttgcgcaggatatcgtgcagatgctgaccaagtacaaggagctgcaggatatcattgcggtgcttggcatcgacgagctgagcgaggaggacaaggttgtggtggaccgcgcgcgcaaggtgacccggttcctgtcgcagccgttccaggttgcggaggtgttcacgggcatgacgggccactacgtgcagctggccgacacggtggagtcgttctctggcctgctgatggggtcgtacgaccagatcccggaga

SEQ ID NO: 534 - DNA, 1298 bp, Leishmania infantum strain MOU
cttctcggagggcgtgccgcccgtactgacggcgctggatgtgacggaggaccttggccgcgatgagccgctgacgctggagatcgtgcagcacttggatgcgaacaccggccgctgcattgcgatgcagacgacggacctgctgaagctgaagtcgaaggttgtgtcgaccggcggcaacatctctgtgccggtgggccgtgagacgctgggccgcatcttcaacgttctgggcgacgcgatcgaccagcgcggccccgtgggcgagaagatgcgcatggcgatccacgccgaggccccaaagctggcggaccaggccgcggaggacacgatcctgacgaccggcatcaaggtgatcgacctcattctgccctactgcaagggcggcaagatcggcctgttcggcggtgccggtgtgggcaagactgtgatcatcatggagctgatcaacaacgtcgcgaagggccacggtggcttctccgtgtttgccggcgttggcgagcgcacgcgcgagggcacggacctatacctggagatgatgcagtcgaaggtgattgacctgaagggcgagtcgaagtgcgtgcttgtgtacgggcagatgaacgagcccccgggtgcgcgcgcgcgcgttgcgcagtctgcgctgacgatggcggagtacttccgcgacgtggagggccagaacgtgctgctgttcatcgacaacatcttccgcttcacgcaggcgaactccgaggtgtctgcgctgctgggccgcattccggccgccgtgggctaccagccgacgcttgccgaggatcttggtatgctgcaggagcgcatcacatcgacgacgaaggggtcgatcacgtccgtgcaggccgtgtacgtgccggcggatgatatcactgatcccgcgcccgcgacgacgttctcgcacctggacgcgacgactgtgctggaccgcgcggtggcggagtcgggcatctaccctgccgtgaacccgctggagtgcgcgtcgcgtatcatggaccccgatgtgatcgatgtggaccactacaacgttgcgcaggatatcgtgcagatgctgaccaagtacaaggagctgcaggatatcattgcggtgcttggcatcgacgagctgagcgaggaggacaaggttgtggtggaccgcgcgcgcaaggtgacccggttcctgtcgcagccgttccaggttgcggaggtgttcacgggcatgacgggccactacgtgcagctggccgacacggtggagtcgttctctggcctgctgatggggtcgtacgaccagatcccggaga

SEQ ID NO: 535 - DNA, 1301 bp, Leishmania gerbilli ATCC 50121
gcacttctcggagggcgtgccgcccgtgctgacggcgctggatgtgacggaggaccttggccgcgatgagccgctgacgctggagatcgtgcagcacttggacgcgaacaccggccgctgcattgcgatgcagacgacggacctgctgaagctgaagtcgaaggttgtgtcgaccggtggcaacatctctgtgccggtgggccgtgagacgctgggccgcatcttcaacgttctgggcgatgcgatcgaccagcgcggccccgtgggcgagaagatgcgcatggcgatccacgccgaggccccgaagctggcggatcaggccgcggaggacacgatcctgacgaccggcatcaaggtgatcgacctgattctgccctactgcaagggtggcaagatcggyctgttcggcggtgccggtgtgggcaagactgtgatcatcatggagctgatcaacaacgtcgcgaagggccacggtggtttctccgtgtttgccggcgttggcgagcgcacgcgcgagggcacggacctgtacctggagatgatgcagtcgaaggtgattgacctgaagggcgagtcgaagtgcgtgcttgtgtacgggcagatgaacgagcccccgggtgcgcgcgcgcgcgttgcgcagtctgcgctgacgatggcggagtacttccgcgacgtggagggccagaacgtgctgctgttcatcgacaacatcttccgcttcacgcaggcgaactccgaggtgtccgcgctgctgggccgcattccggccgccgtgggctaccagccgacgcttgcggaggatcttggtatgctgcaggagcgcatcacgtcgacaacgaaggggtcgatcacgtccgtgcaggccgtgtacgtgccagcggatgatatcacggatcccgcgcccgcgacgacgttctcgcaccttgacgcgacgactgtgctggaccgcgcggtggcggagtcgggcatctaccctgccgtgaacccgctggagtgcgcgtcgcgtatcatggaccccgatgtgatcgatgtggaccactacaacgttgcgcaggatatcgtgcagatgctgaccaagtacaaggagctgcaggacatcattgcggtgcttggcatcgacgagctgagcgaggaagacaaggttgtggtggaccgcgcgcgcaaggtgacccggttcctgtcgcagccgttccaggttgcggaggtgttcacgggcatgacgggccactacgtgcagctggtcgacacggtggagtcgttctctggcttgctgatggggtcgtacgaccagatcccggaga

SEQ ID NO: 536 - DNA, 1298 bp, Leishmania hertigi ATCC 50125
cttcgcggagggcgtgccgccggtgctgacgtcgctggatgtgacggagaacctcggccgcgatgagccgctgacgctggagattgtgcagcacttggacgcgaacaccggtcgctgcattgcgatgcagacgacggacctgctgaagctgaagtcgaaggtcgtgtcgaccggtggcaacatctctgtgcctgttggccgcgagacgctgggtcgcatcttcaacgtgcttggcgatgcgattgaccagcgcggccctgtgggtgagaagatgcgcatggcgatccacgccgaggcgccgaagctggcggatcaggcggcagaggacacgatcctgacgaccggcatcaaggtgatcgatcttattctgccgtactgcaagggtggtaagatcggtctgttcggtggtgccggtgtaggcaagactgtgattattatggagctgatcaataacgtggcgaagggccacggtgggttttccgtgtttgctggcgtgggcgagcgcacgcgcgagggcactgacctgtacctggagatgatgcagtcgaaggtgattgacctgaagggcgaatcaaagtgcgtgcttgtgtacggacagatgaacgagcccccgggtgcgcgtgcgcgcgttgcgcagtctgcgctgacgatggccgagtacttccgcgatgtggagggccagaacgtgctgctgttcattgacaacatcttccgcttcacgcaggcgaactccgaggtgtctgcgctgctgggtcgcattcctgccgccgtgggctaccagccgacgcttgcggaggatctgggcatgctgcaggagcgcattacgtcgacgacgaagggctcgattacgtctgtgcaggccgtgtacgtgcctgcggatgatatcacggacccggcgcccgcgacgacgttctcgcacctggacgcgacgactgtgctggaccgtgcggtggcagagtcgggcatttaccctgcggtgaacccgctggagtgcgcgtcgcgtatcatggaccccgatgtgatcgatgtggaccactacaacgttgcgcaggatatcgtgcagatgctgaccaagtacaaggagctgcaggatatcattgccgtgcttggtatcgacgagctgagcgaggaggacaaggttgtggtggaccgcgcgcgcaaggtgacccggttcctgtcgcagccgttccaggttgcggaggtgttcactggcatgacgggtcactacgttcagctggaggacacggtggagtcgttctctggcctactgatggggtcatacgaccagatcccggaga

SEQ ID NO: 537 - DNA, 1297 bp, Leishmania major ATCC 50122
cttctcggagggcgtgccgcccgtgctgacggcgctggatgtgacggaggaccttggccgtgatgagccgctgacgctggagatcgtgcagcacttggacgcgaacaccggccgctgcattgcgatgcagacgacggacctgctgaagctgaagtcgaaggttgtgtcgaccggcggcaacatctctgtgccggtgggccgtgagacgctgggccgcatcttcaacgttctgggcgatgcgatcgaccagcgcggccccgtgggcgagaagatgcgcatggcgatccacgccgaggccccgaagctggcggatcaggccgcagaggacacgatcctgacgaccggcatcaaggtgatcgacttgatcctgccctactgcaagggtggcaagatcggcctgttcggcggtgccggtgtgggcaagactgtgatcatcatggagctgatcaacaatgtcgcgaagggccacggtggtttctccgtgtttgccggcgttggcgagcgcacgcgcgagggcacggacctgtacctggagatgatgcagtcgaaggtgattgacctgaagggcgagtcgaagtgcgtgcttgtgtacgggcagatgaacgagcccccgggtgcgcgcgcgcgcgttgcgcagtctgcgctgacgatggcggagtacttccgcgacgtggagggccagaacgtgctgctgttcatcgacaacatcttccgcttcacgcaggcgaactccgaggtgtccgcgctgctgggccgcattccggccgccgtgggctaccagccgacgcttgcggaggatcttggtatgctgcaggagcgcatcacgtcgacaacgaaggggtcgatcacgtccgtgcaggccgtgtacgtgccagcggatgatatcacggatcccgcgcccgcgacgacgttctcgcacctggatgcgacgactgtgctggaccgcgcggtggcggagtcgggcatctaccctgccgtgaacccgctggagtgcgcgtcgcgtatcatggaccccgatgtgatcgatgtggaccactacaacgttgcgcaggatatcgtgcagatgctgaccaagtacaaggagctgcaggacatcattgcggtgcttggcatcgacgagctgagcgaggaagacaaggttgtggtggaccgcgcgcgcaaggtgacccggttcctgtcgcagccgttccaggttgcggaggtgttcacgggcatgacgggccactacgtgcagctggtcgacacggtggagtcgttctctggcctgctgatggggtcgtacgaccagatcccggag

SEQ ID NO: 538 - DNA, 1297 bp, Leishmania amazonensis ATCC 50131
ttctcggagggcgtgccgcccgtgctgacggcgctggatgtgacggaggaccttggccgcgatgagccgctgacgctggagatcgtgcagcacctggacgcgaacaccggccgctgcattgcgatgcagacgacggacctgttgaagctgaagtcgaaggttgtgtcgaccggcggcaacatctctgtgccggtgggccgtgagacgctgggccgcatcttcaacgtgctgggcgacgcgatcgaccagcgcggccccgtgggtgagaagatgcgcatggcgatccacgccgaggccccgaagctggcggatcaggccgcggaggacacgatcctgacgaccggcatcaaggtgatcgacctgattctgccctactgcaagggtggcaagatcggcctgtttggtggcgccggtgtgggcaagaccgtgatcatcatggagttgattaacaacgtcgcgaagggccacggtggtttctcggtgtttgccggcgttggcgagcgcacgcgcgagggcacggacctgtacctggagatgatgcagtcgaaggtgattgacctgaagggcgagtcgaagtgcgtgcttgtgtacgggcagatgaacgagcccccgggtgcgcgcgcgcgcgttgcgcagtctgcgctgacgatggcggagtacttccgagacgtggagggccagaatgtgctgctgttcatcgacaacatcttccgcttcacgcaggcgaactccgaggtgtctgcgctgctgggccgcattccggccgccgtgggctaccagccgacgcttgcggaggatcttggtatgctgcaggagcgcatcacgtcgacgacgaaggggtcgatcacgtccgtgcaggccgtgtacgtgcctgcggatgatatcacggatccggcgcccgcgacgacgttctcgcacctggacgcgacgactgtgctggaccgcgcggtggcggagtcggggatctaccctgccgtgaacccgctggagtgcgcgtcgcgtatcatggaccccgatgtgatcgacgtggaccactacaacgttgcgcaggatatcgtgcagatgctgaccaagtacaaggagctgcaggatatcattgcggtgcttggtatcgacgagctgagcgaggaggacaaggtcgtggtggaccgcgcgcgcaaggtgacccggttcctgtcgcagccgttccaggttgcggaggtgttcacgggcatgacgggccactacgtgcagctggccgacacggtggagtcgttctctgggctgctgatggggtcgtacgaccagatcccggaga

SEQ ID NO: 539 - DNA, 27 bp, Artificial Sequence
  modified_base (3): i
  modified_base (18): i
  modified_base (21): i
  Synthetic DNA Sequence
ccntacatcctbgtygcnctnaacaag

SEQ ID NO: 540 - DNA, 23 bp, Artificial Sequence
  modified_base (6): i
  modified_base (18): i
  Synthetic DNA Sequence
ggdgcntcytcrtcgwantcctg

SEQ ID NO: 541 - DNA, 23 bp, Artificial Sequence
  Synthetic DNA Sequence
gtkgaaatgttccgcaagctgct

SEQ ID NO: 542 - DNA, 24 bp, Artificial Sequence
  Synthetic DNA Sequence
cggaartagaactgsggacggtag

SEQ ID NO: 543 - DNA, 23 bp, Artificial Sequence
  Synthetic DNA Sequence
atcttagtagtttctgctgctga

SEQ ID NO: 544 - DNA, 23 bp, Artificial Sequence
  Synthetic DNA Sequence
aygttgtcgccmggcattmccat

SEQ ID NO: 545 - DNA, 26 bp, Artificial Sequence
  Synthetic DNA Sequence
  modified_base (15): i
  modified_base (18): i
tacatcctbgtygcnctnaacaagtg

SEQ ID NO: 546 - DNA, 23 bp, Artificial Sequence
  modified_base (6): i
  Synthetic DNA Sequence
ccrcgnccggtratggtgaagat

SEQ ID NO: 547 - DNA, 23 bp, Artificial Sequence
  Synthetic DNA Sequence
gtacagttgcttcaggacgtatc

SEQ ID NO: 548 - DNA, 21 bp, Artificial Sequence
  Synthetic DNA Sequence
acgttcgatttcatcacgttg

SEQ ID NO: 549 - DNA, 24 bp, Artificial Sequence
  Synthetic DNA Sequence
gaacgtgatactgacaaaccttta

SEQ ID NO: 550 - DNA, 20 bp, Artificial Sequence
  Synthetic DNA Sequence
gaagaagaacaccaacgttg

SEQ ID NO: 551 - DNA, 25 bp, Artificial Sequence
  Synthetic DNA Sequence
gaagaaaaaatcttcgaactggcta

SEQ ID NO: 552 - DNA, 19 bp, Artificial Sequence
  Synthetic DNA Sequence
tacacggccggtgactacg

SEQ ID NO: 553 - DNA, 25 bp, Artificial Sequence
  Synthetic DNA Sequence
ggccgtgttgaacgtggtcaaatca

SEQ ID NO: 554 - DNA, 24 bp, Artificial Sequence
  Synthetic DNA Sequence
gttccttacatcgttgtttttctc

SEQ ID NO: 555 - DNA, 24 bp, Artificial Sequence
  Synthetic DNA Sequence
tctcgaactttctctatgtatgca

SEQ ID NO: 556 - DNA, 21 bp, Artificial Sequence
  Synthetic DNA Sequence
  modified_base (7): n=a,t,c or g
cggcgcnatcytsgttgttgc

SEQ ID NO: 557 - DNA, 22 bp, Artificial Sequence
  Synthetic DNA Sequence
ccmaggcatraccatctcggtg

SEQ ID NO: 558 - DNA, 20 bp, Artificial Sequence
  Synthetic DNA Sequence
  modified_base (3): i
  modified_base (15): i
tcnttyaartaygcntgggt

SEQ ID NO: 559 - DNA, 23 bp, Artificial Sequence
  Synthetic DNA Sequence
  modified_base (12): i
  modified_base (18): i
ccgacrgcrayngtytgnckcat

SEQ ID NO: 560 - DNA, 23 bp, Artificial Sequence
  Synthetic DNA Sequence
gayttcatyaaraayatgatyac

SEQ ID NO: 561 - DNA, 23 bp, Artificial Sequence
  Synthetic DNA Sequence
  modified_base (3): i
  modified_base (6): i
acngtncggccrccctcacggat

SEQ ID NO: 562 - DNA, 30 bp, Artificial Sequence
  Synthetic DNA Sequence
  modified_base (15): i
  modified_base (18): i
  modified_base (21): i
  modified_base (24): i
  modified_base (27): i
caratgraygarccnccnggngynmgnatg

SEQ ID NO: 563 - DNA, 26 bp, Artificial Sequence
  modified_base (9): i
  modified_base (12): i
  modified_base (15): i
  modified_base (18): i
  modified_base (21): i
  Synthetic DNA Sequence
ggytgrtanccnacngcnganggcat

SEQ ID NO: 564 - DNA, 29 bp, Artificial Sequence
  Synthetic DNA Sequence
  modified_base (6): i
  modified_base (21): i
  modified_base (24): i
  modified_base (27): i
tayggncaratgaaygarccnccnggnaa

SEQ ID NO: 565 - DNA, 26 bp, Artificial Sequence
  Synthetic DNA Sequence
  modified_base (9): i
  modified_base (12): i
  modified_base (15): i
  modified_base (18): i
  modified_base (21): i
ggytgrtanccnacngcnganggdat

SEQ ID NO: 566 - DNA, 26 bp, Artificial Sequence
  Synthetic DNA Sequence
  modified_base (6): i
  modified_base (9): i
  modified_base (12): i
  modified_base (15): i
  modified_base (18): i
  modified_base (21): i
ttyggnggngcnggngtnggnaarac

SEQ ID NO: 567 - DNA, 26 bp, Artificial Sequence
  Synthetic DNA Sequence
  modified_base (6): i
  modified_base (9): i
  modified_base (12): i
  modified_base (18): i
  modified_base (21): i
tcrtcngcnggnacrtanayngcytg

SEQ ID NO: 568 - DNA, 23 bp, Artificial Sequence
  Synthetic DNA Sequence
  modified_base (3): i
  modified_base (6): i
  modified_base (9): i
  modified_base (12): i
  modified_base (15): i
  modified_base (18): i
rtnatnggngcngtnrtngaygt

SEQ ID NO: 569 - DNA, 23 bp, Artificial Sequence
  Synthetic DNA Sequence
  modified_base (3): i
  modified_base (6): i
  modified_base (9): i
  modified_base (12): i
  modified_base (15): i
  modified_base (18): i
rtnrtnggnscngtnrtngatat

SEQ ID NO: 570 - DNA, 23 bp, Artificial Sequence
  Synthetic DNA Sequence
  modified_base (3): i
  modified_base (6): i
  modified_base (9): i
  modified_base (12): i
  modified_base (15): i
  modified_base (18): i
rtnrynggnccngtnrtngaygt

SEQ ID NO: 571 - DNA, 23 bp, Artificial Sequence
  Synthetic DNA Sequence
  modified_base (3): i
  modified_base (6): i
  modified_base (9): i
  modified_base (12): i
  modified_base (15): i
  modified_base (18): i
rtnrtnggnccngtnrtngatgt

SEQ ID NO: 572 - DNA, 20 bp, Artificial Sequence
  Synthetic DNA Sequence
  modified_base (3): i
  modified_base (6): i
  modified_base (9): i
  modified_base (12): i
  modified_base (15): i
  modified_base (18): i
rtnrtnggnscngtnrtnga

SEQ ID NO: 573 - DNA, 20 bp, Artificial Sequence
  Synthetic DNA Sequence
  modified_base (3): i
  modified_base (6): i
  modified_base (18): i
ccnccnaccatrtaraangc

SEQ ID NO: 574 - DNA, 23 bp, Artificial Sequence
  Synthetic DNA Sequence
  modified_base (3): i
  modified_base (6): i
  modified_base (15): i
  modified_base (18): i
atngcnatggayggnacngargg

SEQ ID NO: 575 - DNA, 25 bp, Artificial Sequence
  modified_base (2): i
  Synthetic DNA Sequence
tnaccatttcagtaccttctggtaa

SEQ ID NO: 576 - DNA, 26 bp, Artificial Sequence
  Synthetic DNA Sequence
aacttcrtcaagaaggtyggttacaa

SEQ ID NO: 577 - DNA, 20 bp, Artificial Sequence
  Synthetic DNA Sequence
catgattgaaccatccacca

SEQ ID NO: 578 - DNA, 20 bp, Artificial Sequence
  Synthetic DNA Sequence
catgattgaagcttccacca

SEQ ID NO: 579 - DNA, 20 bp, Artificial Sequence
  Synthetic DNA Sequence
gaaggccgtgctggtgagaa

SEQ ID NO: 580 - DNA, 25 bp, Artificial Sequence
  Synthetic DNA Sequence
gctaaaccagctacaatcactccac

SEQ ID NO: 581 - DNA, 22 bp, Artificial Sequence
  Synthetic DNA Sequence
acatcggtgcattattacgtgg

SEQ ID NO: 582 - DNA, 28 bp, Artificial Sequence
  Synthetic DNA Sequence
tttcaacttcgtcgttgacacgaacagt

SEQ ID NO: 583 - DNA, 35 bp, Artificial Sequence
  Synthetic DNA Sequence
caactgctttttggatatcttctttaataccaacg

SEQ ID NO: 584 - DNA, 20 bp, Artificial Sequence
  Synthetic DNA Sequence
acatgacacatctaaaacaa

SEQ ID NO: 585 - DNA, 20 bp, Artificial Sequence
  Synthetic DNA Sequence
accacatactgaattcaaag

SEQ ID NO: 586 - DNA, 20 bp, Artificial Sequence
  Synthetic DNA Sequence
cagaagtatacgtattatca

SEQ ID NO: 587 - DNA, 20 bp, Artificial Sequence
  Synthetic DNA Sequence
cgtattatcaaaagacgaag

SEQ ID NO: 588 - DNA, 20 bp, Artificial Sequence
  Synthetic DNA Sequence
tcttctcaaactatcgtcca

SEQ ID NO: 589 - DNA, 20 bp, Artificial Sequence
  Synthetic DNA Sequence
gcacgaaacttctaaaacaa

SEQ ID NO: 590 - DNA, 20 bp, Artificial Sequence
  Synthetic DNA Sequence
tatacgtattatctaaagat

SEQ ID NO: 591 - DNA, 20 bp, Artificial Sequence
  Synthetic DNA Sequence
tcctggttctattacaccac

SEQ ID NO: 592 - DNA, 20 bp, Artificial Sequence
  Synthetic DNA Sequence
caaagctgaagtatacgtat

SEQ ID NO: 593 - DNA, 20 bp, Artificial Sequence
  Synthetic DNA Sequence
ttcactaactatcgcccaca

SEQ ID NO: 594 - DNA, 20 bp, Artificial Sequence
  Synthetic DNA Sequence
attggtatccatgacacttc

SEQ ID NO: 595 - DNA, 20 bp, Artificial Sequence
  Synthetic DNA Sequence
ttaaagcagacgtatacgtt

SEQ ID NO: 596 - DNA, 20 bp, Artificial Sequence
  Synthetic DNA Sequence
gaaattattggtatcaaaga

SEQ ID NO: 597 - DNA, 20 bp, Artificial Sequence
  Synthetic DNA Sequence
attggtatcaaagaaacttc

SEQ ID NO: 598 - DNA, 20 bp, Artificial Sequence
  Synthetic DNA Sequence
aattacacctcacacaaaat

SEQ ID NO: 599 - DNA, 20 bp, Artificial Sequence
  Synthetic DNA Sequence
cggtgaagaaatcgaaatca

SEQ ID NO: 600 - DNA, 20 bp, Artificial Sequence
  Synthetic DNA Sequence
atgcaagaagaatcaagcaa

SEQ ID NO: 601 - DNA, 20 bp, Artificial Sequence
  Synthetic DNA Sequence
gtttcacgtgatgatgtaca

SEQ ID NO: 602 - DNA, 20 bp, Artificial Sequence
  Synthetic DNA Sequence
aagttgaagttgttggtatt

SEQ ID NO: 603 - DNA, 20 bp, Artificial Sequence
  Synthetic DNA Sequence
ggtattaaagacgaaacatc

SEQ ID NO: 604 - DNA, 20 bp, Artificial Sequence
  Synthetic DNA Sequence
ggtgatgaagtagaaatcgt

SEQ ID NO: 605 - DNA, 20 bp, Artificial Sequence
  Synthetic DNA Sequence
gaaatgttccgtaaattatt

SEQ ID NO: 606 - DNA, 20 bp, Artificial Sequence
  Synthetic DNA Sequence
attagactacgctgaagctg

SEQ ID NO: 607 - DNA, 821 bp, Enterococcus faecalis ATCC 29212
cggagctatcttagtagtttctgctgctgatggtcctatgcctcaaacacgtgaacatatcttattatcacgtaacgttggtgtaccatacatcgttgtattcttaaacaaaatggatatggttgatgacgaagaattattagaattagtagaaatggaagttcgtgacttattatcagaatacgatttcccaggcgatgatgttccagttatcgcaggttctgctttgaaagctttagaaggcgacgagtcttatgaagaaaaaatcttagaattaatggctgcagttgacgaatatatcccaactccagaacgtgatactgacaaaccattcatgatgccagtcgaagacgtattctcaatcactggacgtggtactgttgctacaggacgtgttgaacgtggtgaagttcgcgttggtgacgaagttgaaatcgttggtattaaagacgaaacatctaaaacaactgttacaggtgttgaaatgttccgtaaattattagactacgctgaagcaggcgacaacttcggtgctttattacgtggtgtagcacgtgaagatatcgaacgtggacaagtattagctaaaccagctacaatcactccacacacaaaattcaaagctgaagtatacgtattatcaaaagaagaaggcggacgtcacactccattcttcactaactaccgtcctcaattctacttccgtacaacagacgttactggtgttgtagaattgccagaaggtactgaaatggtaatgcctggtgataacgttgctatggacgttgaattaattcacccaatcgctatcgaagacggaa

SEQ ID NO: 608 - DNA, 751 bp, Enterococcus faecium ATCC 19434
cggagctatcttggtagtttctgctgctgacggcccaatgcctcaaactcgtgaacacatcctattgtctcgtcaagttggtgttccttacatcgttgtattcttgaacaaagtagacatggttgatgacgaagaattactagaattagttgaaatggaagttcgtgacctattaacagaatacraattccctggtgrcgatgttcctgtagttgctggatcagctttgaaagctctagaaggcgacgcttcatacgaagaaaaaattcttgaattaatggctgcagttgacgaatacatcccaactccagaacgtgacaacgacaaaccattcatgatgccagttgaagacgtgttctcaattactggacgtggtactgttgctacaggtcgtgttgaacgtggacaagttcgcgttggtgacgaagttgaagttgttggtattgctgaagaaacttcaaaaacaacagttactggtgttgaaatgttccgtaaattgttagacyacgctgaagctggagacracattggtgctttactacgtggtgttgcacgtgaagacatccaacgtggacaagttttagctaaaccaggtacaatcacacctcrtacaaaattctctgcagaagtatacgtgttgacaaaagaagaaggtggacgtcatactccattcttcactaactaccgtccacaattctacttccgtacaactgacgtaacaggtgttgttgaattaccagaaggaactgaa

SEQ ID NO: 609 - DNA, 751 bp, Enterococcus gallinarum ATCC 49573
cggtgcgatcttagtagtatctgctgctgacggtcctatgcctcaaactcgtgaacacatcttgttatcacgtaacgttggcgwaccatacatcgttgttttcttgaacaaaatggatatggttgaygacgaagaattgctagaattagttgaaatggaagttcgtgacctattgtctgaatatgacttcccaggcgacgatgttcctgtaatcgccggttctgctttgaaagctcttgaaggagatccttcatacgaagaaaaaatcatggaattgatggctgcagttgacgaatacgttccaactccagaacgtgatactgacaaaccattcatgatgccagtcgaagacgtattctcaatcactggacgtggtactgttgctacaggccgtgttgaacgtggacaagttcgcgttggtgatgaagtagaaatcgttggtattgctgacgaaactgctaaaacaactgtaacaggtgttgaaatgttccgtaaattgttagactatgctgaagcaggggataacattggtgcattgctacgtggggttgctcgtgaagacatccaacgtggacaagtattggctaaagctggtacratcacacctcatacaaaattcaaagctgaagtttatgttttgacaaaagaagaaggtggrcgtcacactccattcttcactaactaccgtcctcagttctacttccgtacaactgacgtaactggtgttgttgaattaccagaaggaactgaa

SEQ ID NO: 610 - DNA, 891 bp, Haemophilus influenzae Rd strain KW20
aatatgattactggtgcggcacaaatggatggtgctattttagtagtagcagcaacagatggtcctatgccacaaactcgtgaacacatcttattaggtcgccaagtaggtgttccatacatcatcgtattcttaaacaaatgcgacatggtagatgacgaagagttattagaattagtcgaaatggaagttcgtgaacttctatctcaatatgacttcccaggtgacgatacaccaatcgtacgtggttcagcattacaagcgttaaacggcgtagcagaatgggaagaaaaaatccttgagttagcaaaccacttagatacttacatcccagaaccagaacgtgcgattgaccaaccgttccttcttccaatcgaagatgtgttctcaatctcaggtcgtggtactgtagtaacaggtcgtgtagaacgaggtattatccgtacaggtgatgaagtagaaatcgtcggtatcaaagatacagcgaaaactactgtaacgggtgttgaaatgttccgtaaattacttgacgaaggtcgtgcaggtgaaaacatcggtgcattattacgtggtaccaaacgtgaagaaatcgaacgtggtcaagtattagcgaaaccaggttcaatcacaccacacactgacttcgaatcagaagtgtacgtattatcaaaagatgaaggtggtcgtcatactccattcttcaaaggttaccgtccacaattctatttccgtacaacagacgtgactggtacaatcgaattaccagaaggcgtggaaatggtaatgccaggcgataacatcaagatgacagtaagcttaatccacccaattgcgatggatcaaggtttacgtttcgcaatccgtgaaggtggccgtacagtaggtgcaggc

SEQ ID NO: 611 - DNA, 818 bp, Staphylococcus epidermidis ATCC 14990
cggcggtatcttagttgtatctgctgctgacggtccaatgccacaaactcgtgaacacatcttattatcacgtaacgttggtgtaccagcattagttgtattcttaaacaaagttgacatggtagacgacgaagaattattagaattagttgaaatggaagttcgtgacttattaagcgaatatgacttcccaggtgacgatgtacctgtaatcgctggttctgcattaaaagcattagaaggcgatgctgaatacgaacaaaaaatcttagacttaatgcaagcagttgatgattacattccaactccagaacgtgattctgacaaaccattcatgatgccagttgaggacgtattctcaatcactggtcgtggtactgttgctacaggccgtgttgaacgtggtcaaatcaaagttggtgaagaagttgaaatcatcggtatgcacgaaacttctaaaacaactgttactggtgtagaaatgttccgtaaattattagactacgctgaagctggtgacaacatcggtgctttattacgtggtgttgcacgtgaagacgtacaacgtggtcaagtattagctgctcctggttctattacaccacacacaaaattcaaagctgaagtatacgtattatctaaagatgaaggtggacgtcacactccattcttcactaactatcgcccacaattctatttccgtactactgacgtaactggtgttgtaaacttaccagaaggtacagaaatggttatgcctggcgacaacgttgaaatgacagttgaattaatcgctccaatcgctatcgaagacggaa

SEQ ID NO: 612 - DNA, 825 bp, Salmonella choleraesuis subsp. choleraesuis ATCC 9150
ggcgcgatcctggttgttgctgcgactgacggcccgatgccgcagacccgtgagcacatcctgctgggtcgtcaggtaggcgttccgtacatcatcgtgttcctgaacaaatgcgacatggttgatgacgaagagctgctggaactggttgaaatggaagttcgtgaacttctgtctcagtacgacttcccgggcgacgacacgccgatcgttcgtggttctgctctgaaagcgctggaaggcgacgcagagtgggaagcgaaaatcatcgaactggctggcttcctggattcttacatcccggaaccagagcgtgcgattgacaagccgttcctgctgccgatcgaagacgtattctccatctccggtcgtggtaccgttgttaccggtcgtgtagaacgcggtatcatcaaagtgggcgaagaagttgaaatcgttggtatcaaagagactcagaagtctacctgtactggcgttgaaatgttccgcaaactgctggacgaaggccgtgccggtgagaacgtaggtgttctgctgcgtggtatcaaacgtgaagaaatcgaacgtggtcaggtactggctaagccgggcaccatcaagccgcacaccaagttcgaatctgaagtgtacattctgtccaaagatgaaggcggccgtcatactccgttcttcaaaggctaccgtccgcagttctacttccgtactactgacgtgactggcaccatcgaactgccggaaggcgtagagatggtaatgccgggcgacaacatcaaaatggttgttaccctgatccacccgatcgcaatggacgacggtctgcgtttc

SEQ ID NO: 613 - DNA, 778 bp, Serratia ficaria ATCC 33105
ggcgctatcctggttgttgctgcgactgacggcccaatgcctcagacccgtgagcacatcctgctgggtcgycaggttggcgttcctttcatcatcgtrttcatgaacaaatgcgacatggttgatgatgaagagctgctggaactggtagaaatggaagttcgcgaactgctgtccgcttacgacttccctggcgatgacctgccggtgattcgcggttccgcgctgaaagcgctggaaggcgaagccgagtgggaagctaaaatcatcgagctggctgamcmsctggatacttacatcccagaaccagagcgcgctatcgacaagccgttcctgctgccaatcgaagacgtattctccatctccggtcgtggtaccgtggttaccggtcgtgttgagcgcggtatcatcaaagttggcgaagaagttgaaatcgttggtatcaaagacaccgtcaagtctacctgtaccggcgttgaaatgttccgcaaactgctggacgaaggccgtgccggtgagaacgtaggtgttctgctgcgtggtatcaagcgtgaagacatcgaacgtggtcaggttctggctaaaccaggttccatcaagccgcacacccagttcgattcagaagtgtacatcctgagcaaagaagaaggtggtcgtcacackccattcttcaaaggctaccgtccacagttctacttccgtactactgacgtgaccggtaccatcgaactgccagaaggcgttgagatggtaatgcctggcgacaacgtgaacatga

SEQ ID NO: 614 - DNA, 653 bp, Enterococcus malodoratus ATCC 43197
gtgcgatcttagtagtatcagctactgatggtccaatgcctcaaactcgtgaacacattttgttatcacgtcaagttggtgttaagcacttgatcgttttcttgaacaaagtagatttagttgatgacgaagaattgatcgacttagttgaaatggaagtacgtgaattactttctgaatatggtttcccaggtgatgatattccagtgcttaaaggttctgctttgaaagcattagaaggcgatccagaacaagaacaagttattcttgatttgatggataccgttgatgaatatatcccaacacctgaacgtgacaatgacaaaccgttcttgttaccagttgaggatgttttctcgatcacaggacgtggtactgtagcttctggtcgtatcgaccgtggcgaagttaaagtcggcgatgaaattgaaatcatcgggatcaaacctgaagttcaaaaagcaatcgttactggacttgaaatgttccgtaaaacattggattatggtgaagctggcgataacgttggggttctattacgtgggattacacgtgatgaaatcgaacgtggccaagtattagctaaaccaggttcaatcacaccacatactaagttcaaagccgaagtatatgtgttgacgaaagaagaaggt

SEQ ID NO: 615 - DNA, 829 bp, Enterococcus durans ATCC 19432
ccattctagttgtatctgcaacagatggaccaatgccacaaacacgtgaacatattttattgtcacgtcaagtaggtgttaaatatttgatcgtcttcttgaacaaaatcgacttagtagatgatgaagaattgattgatcttgtcgaaatggaagttcgtgaattattaagcgaatatggtttcccaggtgacgatacaccagtcatcaaaggttcagcattaaaagctttacaaggagatcctgatgcagaagcagctatcatggaattgatggatactgttgatgaatatatcccaacaccagaacgtgatacagacaaaccattattgttaccagtggaagatgtcttctcaatcacaggtcgtgggactgttgcttcaggtcgtatcgatcgtggtgcagttcgtgtaggtgatgaaatcgaaatcgtcggtatcaaacctgaaacacaaaaagctgttgtaactggggtcgaaatgttccgcaagacattagactatggtgaagcaggagataacgttggggtattgttacgtggtatccaacgtgaagatatcgaacgtggacaagtaatcgcaaaaccaggttcaatcacaccacatacaaaattcaaagcagaagtgtacgtattgacaaaagaagaaggtggacgtcatacaccattcttcaataactatcgtccacaattctacttccgtacaactgacgtaactggaacaatcgttttacctggaggcactgaaatggttatgcctggagataacgtaacgatcgacgttgaattgatccatccagttgccatcgaaaacggaacaactttctctat

SEQ ID NO: 616 - DNA, 669 bp, Enterococcus pseudoavium ATCC 49372
ggtgcaattttagtagtatctgctactgatggcccaatgccacaaacacgtgaacatatcttgttatcacgtcaagtaggggttaaacacttaatcgtcttcttgaacaaagttgatttagttgatgatgaagaattgatcgatttagttgaaatggaagttcgggaattgctttctgaatatggtttcccaggcgatgatattccagtacttaaaggttctgctttgaaagctttagaaggcgatcctgaacaagaacaagtaatccttgacttgatggatacggttgatgaatacatcccaacgcctgaacgtgatactgacaaaccattcttgttaccagtcgaagatgtcttctcaatcacaggacgtggtacggttgcatctggtcgtatcgatcgtggggaagttaaagtcggtgatgaagttgaaatcatcgggatcaaacctgaagtgcaaaaagctgtcgtaactggactagaaatgttccgtaagacattggattacggtgaagctggcgataacgttggggttctattacgtgggattactcgtgatgaaatcgaacgtggacaagtattagctaaaccaggttcaatcactccacatacgaaattcagtgcagaagtttatgtattgacgaaagaagaaggtggccgtcatacgcca

SEQ ID NO: 617 - DNA, 835 bp, Enterococcus dispar ATCC 51266
cggggcaattttagttgtatctgcaactgatggcccaatgccacaaacacgtgaacacattttgttagctcgtcaagtaggggttaaatatttaatcgtcttcttgaacaaaacagatttagttgatgatgaagaattattggaactagttgaaatggaagttcgtgaattattaaatgaatacaatttccctggcgatgatattcctgttattcgcggatctgctttaaaagcattagaaggcgatccagaacaagaagaagtaattatgaacttgatggatactgtggatgaatatatcccaactccagaacgtgacaatgataaaccattcttgttaccagtggaagatgtcttcacaattactggtcgtggtactgttgcttcaggtcgtatcgaccgtggtaaagtcaacgttggtgatgaaattgaaattatcggaattaaaccagaaacacaaaaagctgttgtaaccggtttggaaatgttccgtaaaactttggattatggtgaagctggtgataacgttggggtcttattacgtgggattactcgtgatgaagtagaacgtggtcaagtattagcaaaaccaggttccattacaccgcataccaaatttaaaggtgaagtttatatcttaacaaaagaagaaggtggacgtcatactcctttctttaataactatcgtcctcaattttatttccgtacaactgatgtgactggtaacatcgcattacctgaaggaactgaaatggtaatgcctggtgataatgtaacaattgaagttgaattgattcatccaatcgccgttgaaaaagggactactttctcaatt

SEQ ID NO: 618 - DNA, 673 bp, Enterococcus avium ATCC 14025
ggtgcaatcctagtagtatcagctactgatggtccaatgccgcaaacacgtgaacatattttgctatcacggcaagtgggtgttaaacacttaatcgtatttttaaacaaagttgatttagtcgatgatgaagaattgatcgatctagttgaaatggaagtccgtgaattactttctgaatatggtttcccaggtgacgatattccagttctcaaaggttcagctttgaaagcattagaaggcgatcctgaacaagaacaagtaatccttgatttaatggatacagttgacgaatatatcccaactccagaacgtgacactgacaagccattcttgttaccagtcgaagatgtattttctatcactggtcgtgggactgtagcgtctggacggattgatcgtggtgaagttaaagtcggcgatgaagttgaaatcatcgggatcaaacctgaaattcaaaaagcagtcgtaactggacttgaaatgttccgtaaaactttagattatggtgaagctggcgataacgttggggttctattacgtgggattacacgtgatgaaatcgaacgtggtcaagtcttagctaaaccaggttcaatcacaccacatacaaaattcagtgcagaagtttacgtattgacgaaagaagaaggtggacgtcatacaccatctt

SEQ ID NO: 619 - DNA, 1713 bp, Saccharomyces cerevisiae
tttcatatttttaaggattttgttttagcacccatccgacctcagtcaatatatcctttcgcgaccaggctttcctcccttttgctgctaactggttacagattttcctatttttggtcatttttatctttgaaactgattaagctgaaaaaatttgagcttctttgttgtaaactattttgtgctttcagttttattctagctcgacaaaggtaacagacaaaaatgtcagctttattaccaagattactcacaagaacagcttttaaagcttctgggaaacttctgaggctctcttcagtaatttctaggaccttttctcaaactactacttcctatgcagctgcttttgatcgttccaaaccgcatgtaaatataggtacgatcggccatgttgatcatgggaagacaactttaaccgcagccattacgaaaacgttagccgcaaaaggtggtgccaacttcttggactatgctgccatcgataaggctccggaagaaagagctcgtggtattacaatttctactgcacacgtggaatacgaaacggccaagagacattattctcacgtcgactgtccaggccacgctgattacatcaagaatatgattaccggtgctgctcaaatggatggtgctatcattgttgtagctgctaccgatggacaaatgccccaaactagagaacatttacttttggccagacaagttggtgtccaacatattgtcgtttttgttaacaaggttgataccattgatgatccagaaatgttagagttagtcgaaatggaaatgagagaacttttaaacgaatatgggtttgacggtgataatgctccaattatcatgggttctgccctttgcgctttggaaggtcgccaacctgaaattggggagcaggccatcatgaaacttttggatgcagtggatgagtatattcctacacctgaaagagatttgaacaagcctttcttgatgcccgttgaagatatcttctctatctccggtagaggtactgtggtcactggtcgtgtggaaaggggtaatttaaagaaaggtgaggaattggaaattgttggtcacaactccaccccattgaaaacaacagttactggtattgaaatgtttagaaaggaattggactctgctatggcaggtgacaatgccggtgttttacttagaggtatcaggagagatcaattgaagagaggtatggtcttagctaagccaggtaccgttaaagcccatacaaagattctagcctctttgtacattttatccaaagaggaaggtggtagacattctgggtttggtgaaaactacagaccacaaatgtttataagaacagctgatgttacagttgtgatgagatttcctaaggaggttgaagatcattctatgcaagttatgccaggtgacaatgttgaaatggaatgtgatttgatccatcctaccccattagaagttggtcaacgtttcaatatcagagagggtggaagaactgttggtaccggtctaatcacacgtattattgaatagacttattgatgcaactggagtatatttctatatattctgttcatttcccctctcataatatatacttgtttcgttaaaattttatacgtgtaaataaagtgccataaatttttcagctttacttttggtagagtcctgctagcactagattttacaatttcatgtgcacacacc

SEQ ID NO: 620 - DNA, 18 bp, Artificial Sequence
  Synthetic DNA Sequence
attggtgcattgctacgt

SEQ ID NO: 621 - DNA, 751 bp, Enterococcus faecium ATCC 19434
tggtgcaatcttagttgtttctgcaactgacggtccgatgcctcaaacacgtgaacacattttattgtcacgccaagttggtgtaaaatacctgattgttttcttgaacaaagttgatttagtcgatgatgaagaattgatcgatttggtagaaatggaagttcgcgagttattgagcgaatatggtttcccaggcgatgacactcctgtgatcaaaggttccgcattaaaagcattgcaaggcgatccagatgctgaagctgctattatggaattgatggatacagtagatgaatatatcccaacaccagaacgtgatacagataaaccattactattgccagtggaagacgtcttctcaattacaggtcgaggaactgttgcctcaggtcgtattgatcgtggtgctgttcgtgtcggtgatgaggtagagatcgtagggatcaaacctgaaacacaaaaagcagttgtaacaggtgtagaaatgttccgtaaaacgttagattacggggaagctggggataacgtaggcgtgttgttacgggggatccaacgtgacgatatcgaacgtggacaagtacttgctaaaccaggttccattactccacatacaaaattcaaagcagaagtgtacgtgttgacaaaagaagaaggtggacgtcatactccattcttcaacaactatcgtccacagttctacttccgcacaactgatgttacaggaacaatcacattgccagaagatacagaa

SEQ ID NO: 622 - DNA, 750 bp, Saccharomyces cerevisiae ATCC 13264
gtcaaatgggacgaatccagattccaagaaattgtcaaggaaacctccaactttatcaagaaggttggttacaacccaaagactgttccattcgtcccaatctctggttggaacggtgacaacatgattgaagctaccaccaacgctccatggtacaagggttgggaaaaggaaaccaaggccggtgtcgtcaagggtaagactttgttggaagccattgacgccattgaacaaccatctagaccaactgacaagccattgagattgccattgcaagatgtttacaagattggtggtattggtactgtgccagtcggtagagttgaaaccggtgtcatcaagccaggtatggttgttactttcgccccagctggtgttaccactgaagtcaagtccgttgaaatgcatcacgaacaattggaacaaggtgttccaggtgacaacgttggtttcaacgtcaagaacgtttccgttaaggaaatcagaagaggtaacgtctgtggtgacgctaagaacgatccaccaaagggttgcgcttctttcaacgctaccgtcattgttttgaaccatccaggtcaaatctctgctggttactctccagttttggattgtcacactgctcacattgcttgtagattcgacgaattgttggaaaagaacgacagaagatctggtaagaagttggaagaccatccaaagttcttgaagtccggtgacgctgctttggtcaagttcgttccatctaagcca

SEQ ID NO: 623 - DNA, 1269 bp, Cryptococcus neoformans ATCC 44104
tcttgaaagcttaaggccgagcgagagcgaggtatcaccatcgacattgctctttggaagttcgagacccccaggtaccaggtcaccgtcattgacgcccccggtcaccgagacttcatcaagaacatgatcaccggtacctcccaggctgactgtgccatcctcatcattgccaccggtatcggtgagttcgaggccggtatctccaaggacggtcagacccgagagcacgccctcctcgccttcaccctcggtgtcaggcagctcattgttgcttgcaacaagatggacacctgcaagtggtccgaggaccgattcaacgaaatcgtcaaggagaccaacggtttcatcaagaaggttggttacaaccccaaggctgtccccttcgtccccatctctggttggcacggtgacaacatgttggaggagaccaccaagtcagtgaatccgcttctacgtgatgagatgtttttctgactttccgtgcagcatgccctggtacaagggatggaccaaggagaccaagtctggtgtttccaagggtaagaccctcctcgaggccatcgacgccatcgagccccctacccgacccaccgacaagcccctccgtctccctctccaggacgtctacaagatcggtggtatcggcacagtccctgtcggccgagtcgagaccggtgtcatcaaggccggtatgttgtctcatctctcttgtctcgtaacatgcgtctcgtaacatgcgcttacttcattttcaggtatggtcgtcaagttcgcccccaccaacgtcaccactgaagtcaagtccgttgagatgcaccacgagcagatccccgagggtcttcccggagacaacgttggtttcaacgtcaagaacgtttccatcaaggacatccgacgaggtaacgtctgtggtgactccaagaacgacccccctatggaggctgcttctttcaacgcccaggttatcgtccttaaccaccctggtcagatcggtgccggttacacccccgttctcgactgtcacactgcccgtaagcctgacccaatacctccaacatacctttgaagctgaccctttctagacattgcctgcaagtttgctgagttgatcgagaagattgaccgacgaaccggtaaggtcatggaggccgcccccaagttcgtcaagtctggtgacgccgccattgtcaagcttgttgcccagaagcccctctgtgttgagacctacgccgactacccccctcttggtcgattcgccgtccgaga

SEQ ID NO: 624 - DNA, 753 bp, Candida albicans ATCC 36801
tctgtcaaatgggacaaaaacagatttgaagaaatcatcaaggaaacctccaacttcgtcaagaaggttggttacaacccaaagactgttccattcgttccaatctctggttggaatggtgacaacatgattgaaccatccaccaactgtccatggtacaagggttgggaaaaggaaaccaaatccggtaaagttactggtaagaccttgttagaagctattgacgctattgaaccaccaaccagaccaaccgacaaaccattgagattgccattgcaagatgtttacaagatcggtggtattggtactgtgccagtcggtagagttgaaactggtatcatcaaagccggtatggttgttactttcgccccagctggtgttaccactgaagtcaaatccgttgaaatgcatcacgaacaattggctgaaggtgttccaggtgacaatgttggtttcaacgttaagaacgtttccgttaaagaaattagaagaggtaacgtttgtggtgactccaagaacgatccaccaaagggttgtgactctttcaatgcccaagtcattgttttgaaccatccaggtcaaatctctgctggttactctccagtcttggattgtcaccctgcccacattgcttgtaaattcgacactttggttgaaaagattgacagaagaactggtaagaaattggaagaaaatccaaaattcgtcaaatccggtgatgctgctatcgtcaagatggtcccaaccaaacca

SEQ ID NO: 625 - DNA, 26 bp, Artificial Sequence
  Synthetic DNA Sequence
cgttgaagacacgacccaaagtatcc

SEQ ID NO: 626 - DNA, 26 bp, Artificial Sequence
  Synthetic DNA Sequence
taccaccttttaagtaaggtgctaat

SEQ ID NO: 627 - DNA, 26 bp, Artificial Sequence
  Synthetic DNA Sequence
attgtctataaaaatggcgataagtc

SEQ ID NO: 628 - DNA, 26 bp, Artificial Sequence
  Synthetic DNA Sequence
aaaatggcgataagtcacaaaaagta

SEQ ID NO: 629 - DNA, 25 bp, Artificial Sequence
  Synthetic DNA Sequence
aagttccatctcaacaaggtcaata

SEQ ID NO: 630 - DNA, 22 bp, Artificial Sequence
  Synthetic DNA Sequence
cggagctatcctagtcgtttca

SEQ ID NO: 631 - DNA, 26 bp, Artificial Sequence
  modified_base (13): i
  Synthetic DNA Sequence
cagaccaacyganaarccattragat

SEQ ID NO: 632 - DNA, 23 bp, Artificial Sequence
  Synthetic DNA Sequence
ccctttggtggrtcstkcttgga

SEQ ID NO: 633 - DNA, 26 bp, Artificial Sequence
  modified_base (13): i
  modified_base (19): i
  Synthetic DNA Sequence
cagaccaacyganaarccnttragat

SEQ ID NO: 634 - DNA, 26 bp, Artificial Sequence
  modified_base (15): i
  Synthetic DNA Sequence
aacacygtcagrrcnattgcyatgga

SEQ ID NO: 635 - DNA, 26 bp, Artificial Sequence
  modified_base (9): i
  modified_base (21): i
  Synthetic DNA Sequence
aaaccrgtnarrgcractctngctct

SEQ ID NO: 636 - DNA, 23 bp, Artificial Sequence
  Synthetic DNA Sequence
  modified_base (11): i
actggygttganatgttccgyaa

SEQ ID NO: 637 - DNA, 23 bp, Artificial Sequence
  Synthetic DNA Sequence
  modified_base (9): i
acgtcagtngtacggaartagaa

SEQ ID NO: 638 - DNA, 26 bp, Artificial Sequence
  Synthetic DNA Sequence
  modified_base (15): i
ccaatgccacaaacncgtgarcacat

SEQ ID NO: 639 - DNA, 28 bp, Artificial Sequence
  Synthetic DNA Sequence
  modified_base (25): i
tttacggaacatttcwacaccwgtnaca

SEQ ID NO: 640 - DNA, 23 bp, Artificial Sequence
  Synthetic DNA Sequence
  modified_base (9): i
  modified_base (15): i
tccatggtntwyggncaratgaa

SEQ ID NO: 641 - DNA, 26 bp, Artificial Sequence
  Synthetic DNA Sequence
  modified_base (12): i
  modified_base (15): i
  modified_base (18): i
tgataaccwacngcnganggcatacg

SEQ ID NO: 642 - DNA, 23 bp, Artificial Sequence
  Synthetic DNA Sequence
  modified_base (6): i
  modified_base (9): i
  modified_base (15): i
  modified_base (18): i
ggcgtnggngarcgnacncgtga

SEQ ID NO: 643 - DNA, 23 bp, Artificial Sequence
  Synthetic DNA Sequence
  modified_base (6): i
  modified_base (9): i
actggngtngaratgttccgyaa

SEQ ID NO: 644 - DNA, 23 bp, Artificial Sequence
  Synthetic DNA Sequence
  modified_base (6): i
  modified_base (9): i
  modified_base (12): i
acgtcngtngtnckgaartagaa

SEQ ID NO: 645 - DNA, 23 bp, Artificial Sequence
  Synthetic DNA Sequence
  modified_base (6): i
  modified_base (9): i
  modified_base (12): i
acgtcngtngtnckgaartaraa

SEQ ID NO: 646 - DNA, 23 bp, Artificial Sequence
  Synthetic DNA Sequence
  modified_base (12): i
  modified_base (18): i
atcgacaagccnttcytnatgsc

SEQ ID NO: 647 - DNA, 26 bp, Artificial Sequence
  Synthetic DNA Sequence
acgtccgtsgtrcggaagtagaactg

SEQ ID NO: 648 - DNA, 26 bp, Artificial Sequence
  Synthetic DNA Sequence
acgtcsgtsgtrcggaagtagaactg

SEQ ID NO: 649 - DNA, 26 bp, Artificial Sequence
  Synthetic DNA Sequence
  modified_base (20): i
gtcctatgcctcaracwcgngagcac

SEQ ID NO: 650 - DNA, 23 bp, Artificial Sequence
  Synthetic DNA Sequence
  modified_base (21): i
ttacggaacatytcaacaccngt

SEQ ID NO: 651 - DNA, 25 bp, Artificial Sequence
  Synthetic DNA Sequence
  modified_base (12): i
tgacgaccaccntcytcyttyttca

SEQ ID NO: 652 - DNA, 27 bp, Artificial Sequence
  Synthetic DNA Sequence
  modified_base (9): i
  modified_base (12): i
  modified_base (15): i
  modified_base (24): i
ccwayagtnyknccnccytcyctnata

SEQ ID NO: 653 - DNA, 20 bp, Artificial Sequence
  Synthetic DNA Sequence
  modified_base (9): i
gayttcatnaaraayatgat

SEQ ID NO: 654 - DNA, 20 bp, Artificial Sequence
  Synthetic DNA Sequence
  modified_base (12): i
tacaaratykgnggtatygg

SEQ ID NO: 655 - DNA, 20 bp, Artificial Sequence
  Synthetic DNA Sequence
  modified_base (9): i
ccrataccncmratyttgta

SEQ ID NO: 656 - DNA, 22 bp, Artificial Sequence
  Synthetic DNA Sequence
aattaatggctgcagttgayga

SEQ ID NO: 657 - DNA, 22 bp, Artificial Sequence
  Synthetic DNA Sequence
ttgtccacgttcgatrtcttca

SEQ ID NO: 658 - DNA, 23 bp, Artificial Sequence
  Synthetic DNA Sequence
gatytagtcgatgatgaagaatt

SEQ ID NO: 659 - DNA, 23 bp, Artificial Sequence
  Synthetic DNA Sequence
  modified_base (9): i
gctttttgngtttcwggtttrat

SEQ ID NO: 660 - DNA, 23 bp, Artificial Sequence
  Synthetic DNA Sequence
gtagaattgaggacggtagttag

SEQ ID NO: 661 - DNA, 23 bp, Artificial Sequence
  Synthetic DNA Sequence
gtagaaytgtggwcgatarttrt

SEQ ID NO: 662 - DNA, 832 bp, Corynebacterium diphtheriae ATCC 27010
cggcgcaatcctcgttgttgctgccaccgacggcccaatgcctcagacccgtgagcacgttctgctcgctcgccaggtcggcgttccttacatcctcgttgctctgaacaagtgcgacatggttgatgatgaggaaatcatcgagctcgtcgagatggagatccrtgagctgctcgctgagcaggattacgacgaagaggctccaatcatccacatctccgcactgaaggctcttgagggcgacgagaagtggacccagtccatcatcgacctcatgcaggcttgckatgattccatcccagacccagagcgtgagaccgacaagccattcctcatgcctatcgaggacatcttcaccatcaccggccgcggtaccgttgttaccggccgtgttgagcgtggctccctgaaggtcaacgaggacgtcgagatcatcggtatccgcgagaakgctaccaccaccaccgttaccggtatcgagatgttccgtaagcttctcgactacaccgaggctggcgacaactgtggtctgcttctccgtggcgttaagcgcgaagacgttgagcgtggccaggttgttgttaagccaggcgcttacacccctcacaccgagttcgagggctctgtctacgttctgtccaaggacgagggtggccgccacaccccattcttcgacaactaccgcccacagttctacttccgcaccaccgacgttaccggtgttgtgaagcttcctgagggcaccgagatggtcatgcctggcgacaacgtcgacatgtccgtcaccctgatccagcctgtcgctatggatgagggcctgcgcttcgctatc

SEQ ID NO: 663 - DNA, 1192 bp, Candida catenulata ATCC 10565
aacggcgagcaagacttggtgttggaggtttctcagcacttgggtgagaacaccgtgcgtaccattgccatggacggtaccgagggtttggtgagaggtaccgctgtcactgacaccggtgctcccatctcggtccccgttggtcagggtaccttgggccggatcatcaacgttgtcggtgagcccatcgacgagcgtggtcccatccagtgcaagcagagaaaccccattcacgccgagcccccgtctttcaccgagcagtccgtcgaggctgaggtgttggagaccggtatcaaggttgtcgacttgttggctccctacgcccgtggtggtaagattggtcttttcggtggtgccggtgtcggtaagaccgtgttcatccaggagttgattaacaacattgccaaggcccacggtggtttctccgtgttcactggtgtcggtgagcgtactcgtgagggtaacgacttgtaccgtgaaatgaaggagaccggtgtcatcaacttggagggcgactccaaggtggccttggtgttcggtcagatgaacgagcccccgggggctcgtgcccgtgtcgccttgaccggtttgaccattgccgagtacttccgtgacgaggaaggccaggacgtgttgttgttcgttgacaacattttcagattcacccaggccggttccgaggtgtcggcgttgttgggtcgtatcccctccgccgtcggttaccagcccactttggccaccgacatgggtttgttgcaggagagaattaccaccaccaagaagggttccgtcacctctgtgcaggccgtgtacgtccctgccgatgacttgactgaccctgcccccgccaccactttcgctcacttggacgccaccaccgtgttgtcgcgtggtatctccgagttgggtatctaccccgccgtcgaccccttggactccaagtcgagattgttggacgtcgaggttgttggccaggagcactacgacgtcgccaccggtgtccaggagtgcttgcaggcctacaagtcgttgcaggacatcattgccattttgggtatggacgagttgtccgagcaggacaagttgaccgtcgagagagcccgtaagatccagcgtttcttgtcgcagcccttcgctgtcgccgaggttttcactggtatccccggtagattggtgagattgcaggacaccg

SEQ ID NO: 664 - DNA, 29 bp, Artificial Sequence
  Synthetic DNA Sequence
  modified_base (9): i
  modified_base (12): i
  modified_base (15): i
  modified_base (18): i
  modified_base (21): i
aayatgatnacnggngcngcncaratgga

SEQ ID NO: 665 - DNA, 1377 bp, Saccharomyces cerevisiae
atgggtaaagagaagtctcacattaacgttgtcgttatcggtcatgtcgattctggtaagtctaccactaccggtcatttgatttacaagtgtggtggtattgacaagagaaccatcgaaaagttcgaaaaggaagccgctgaattaggtaagggttctttcaagtacgcttgggttttggacaagttaaaggctgaaagagaaagaggtatcactatcgatattgctttgtggaagttcgaaactccaaagtaccaagttaccgttattgatgctccaggtcacagagatttcatcaagaacatgattactggtacttctcaagctgactgtgctatcttgattattgctggtggtgtcggtgaattcgaagccggtatctctaaggatggtcaaaccagagaacacgctttgttggctttcaccttgggtgttagacaattgattgttgctgtcaacaagatggactccgtcaaatgggacgaatccagattccaagaaattgtcaaggaaacctccaactttatcaagaaggttggttacaacccaaagactgttccattcgtcccaatctctggttggaacggtgacaacatgattgaagctaccaccaacgctccatggtacaagggttgggaaaaggaaaccaaggccggtgtcgtcaagggtaagactttgttggaagccattgacgccattgaacaaccatctagaccaactgacaagccattgagattgccattgcaagatgtttacaagattggtggtattggtactgtgccagtcggtagagttgaaaccggtgtcatcaagccaggtatggttgttacttttgccccagctggtgttaccactgaagtcaagtccgttgaaatgcatcacgaacaattggaacaaggtgttccaggtgacaacgttggtttcaacgtcaagaacgtttccgttaaggaaatcagaagaggtaacgtctgtggtgacgctaagaacgatccaccaaagggttgcgcttctttcaacgctaccgtcattgttttgaaccatccaggtcaaatctctgctggttactctccagttttggattgtcacactgctcacattgcttgtagattcgacgaattgttggaaaagaacgacagaagatctggtaagaagttggaagaccatccaaagttcttgaagtccggtgacgctgctttggtcaagttcgttccatctaagccaatgtgtgttgaagctttcagtgaatacccaccattaggtagattcgctgtcagagacatgagacaaactgtcgctgtcggtgttatcaagtctgttgacaagactgaaaaggccgctaaggttaccaaggctgctcaaaaggctgctaagaaataa

SEQ ID NO: 666 - DNA, 1536 bp, Saccharomyces cerevisiae
atggttttgccaagactatatactgctacatcccgtgctgcttttaaagcagccaaacaatccgctccgcttctatccacttcgtggaaaagatgtatggcctcagctgctcaatctactccaatcaccggtaaagttaccgctgtcattggtgccattgttgacgttcattttgaacaatcagagttgcccgctattttgaacgctttagaaattaaaacacctcaaggtaagttggttttggaagttgctcaacatttgggtgaaaacactgtcagaaccattgctatggatggtaccgaaggtttggtccgtggtgaaaaggttcttgacactggtggccctatctccgtcccagttgggagagaaactttagggagaatcatcaacgttatcggtgaacctattgatgaaagaggtccaattaagtccaaactaagaaagccaattcacgcagaccctcctagttttgcagaacaatctacttcggctgaaattttggaaacaggtatcaaagtcgtcgatctattagctccttatgccagaggtggtaagattggtcttttcggtggtgcaggtgtcggtaagactgtgttcattcaagaattgattaacaatatcgccaaggcccatggtggtttttccgttttcgccggtgttggtgaaaggaccagagagggtaatgacttgtaccgtgaaatgaaggaaactggagtcattaacttggaaggtgaatccaaggtcgccttagttttcggtcaaatgaacgaacctccaggagccagagccagagtcgctttaactggtttgacgatcgctgaatatttcagagatgaagaaggtcaagacgtcttgttgtttatcgacaatatctttagatttactcaagctggttcagaagtctctgcccttttgggtcgtattccatctgccgtcggttatcaaccaactttggccactgatatgggtctcttacaagaaagaattaccaccacaaagaagggttctgtcacttctgtgcaagccgtttatgttccagccgatgatttaacagatccgtctccgtccacatcttttgcccatttggacgcatcatccgtcttgtcaagaggtatttcagaattaggtatttaccctgcagtggatccattggattctaaatcaaggttattggatgccgccgttgtcggtcaagaacattatgacgtcgcctccaaggttcaagaaactttacagacctataaatctttacaagatatcattgctattttgggtatggatgaattgtccgaacaagataaactaactgtcgaaagggcaagaaagattcaaagattcttatctcaaccatttgctgtcgccgaagtctttactggtatcccaggtaaattagtgagattaaaggacaccgttgcctcgttcaaagccgttttggaaggtaaatacgataatataccagaacatgctttctatatggttggtggtattgaagatgttgttcgtaaagctgaaaagttagcccgtgaagccaactag

SEQ ID NO: 667 - DNA, 1293 bp, Trypanosoma cruzi strain Y
cggaaggcgtgccgccggtgttaactgctttggatgtggtggaaaaacttggccgtgacgagcccttgacacttgaaattgtacagcacttggacgcccacaccggccgttgcattgcgatgcagacgacagatctgcttaagctgaaatcgaaggtagtctcgagtggcgggaacatttctgtgcctgtgggtcgggagacacttggcagaatcttcaatgtgctgggcgatgccattgaccagcgcggccatgttggagagaagcaacgcatgcctattcacgctgtggcaccaaagttggcggatcaggcggcagaggacaccattctcacaacgggtatcaaggtgattgatctgattttgccctactgcaagggtgggaagattggtctttttggtggtgctggcgtgggcaagacggttattatcatggaacttattaacaacgttgccaagggccatggtgggttctccgtctttgcgggtgttggtgaacgcacgcgtgaggggacggatctttacctggagatgatgcaatccaaagttattgacctgaagggtgactcgaagtgtgtgttggtgtatggtcagatgaacgagcctccgggtgcccgtgctcgtgtggcgcagtctgccttgacaatggccgagtacttccgtgatgtggaagggcaagacgtgttgctttttatcgacaacattttccgctttacgcaggcaaactctgaggtgtcagcgctgttgggtcgtattcccgctgccgtcggctaccagcctacccttgctgaggatcttgggcagttgcaggagcgcattacgtccacgacaaaaggttccattacctctgtgcaggctgtgtacgtgccagccgatgatattaccgaccctgcgccagcaacgaccttttcccacctcgatgccacgacggtgctggaccgtgccgttgccgaatccggcatttaccccgctgtcaacccactggagtgtgcctcgcgtatcatggacccggatgtaatcagcgttgaccactacaacgtggcgcaggatgtggtgcagatgcttaccaagtacaaggagctgcaggatatcattgcggtgcttggcattgatgagctcagtgaggaggataaacttatcgtggaccgtgcgcgtaaggtgacaaagtttctctcccagcctttccaggtggcggaggtgtttactggcatgacaggccactacgtgcagctggaggagaccattgagtctttttccggcctgttgatgggcacatatgatcaggtgccggaga

SEQ ID NO: 668 - DNA, 1191 bp, Corynebacterium glutamicum
gtggcaaaggcgaagttcgagcgtaccaagccccacgtaaacatcggcaccatcggtcacgttgaccacggtaagaccaccaccaccgcggctatcaccaaggttctggctgacacttaccctgagctcaacgaggctttcgccttcgactccatcgataaggctcctgaggagaaggagcgtggcatcacgatcaacatctcccacgttgagtaccagactgaaaagcgccactacgcacacgttgacgctccaggccacgccgactacatcaagaacatgattaccggcgctgctcagatggacggcgcaatcctcgttgttgctgctaccgacggcccaatgcctcagacccgtgagcacgttcttcttgctcgccaggttggcgttccttacatcctcgttgctcttaacaagtgcgacatggttgaggatgaggaaatcatcgagctcgtcgagatggaagttcgtgaacttcttgctgagcaggactacgacgaagaggctccaattgttcacatctccgctctgaaggctcttgagggcgacgagaagtggggcaagcagatccttgagctcatgcaggcttgcgatgacaacatccctgacccagttcgtgagaccgacaagccattcctcatgcctatcgaggacatcttcaccatcaccggtcgtggcaccgttgttaccggtcgtgttgagcgcggtaccctgaacgtgaacgatgatgttgacatcatcggcatcaaggagaagtccacctccaccaccgttaccggtatcgagatgttccgtaagcttcttgactccgctgaggctggcgacaactgtggtctgcttctccgtggtatcaagcgcgaagatgttgagcgtggccaggttatcgttaagccaggcgcttacacccctcacaccgagttcgagggctctgtctacgttctgtccaaggatgaaggtggccgccacaccccattcttcgacaactaccgtcctcagttctacttccgcaccaccgacgttaccggtgttgtgaagcttccagagggcaccgagatggtcatgcctggcgacaacgtcgacatgtccgtcaccctgatccagcctgtcgctatggacgagggcctgcgtttcgctatccgcgaaggctcccgcaccgttggcgctggtcgtgtcaccaagatcatcaagtaa

SEQ ID NO: 669 - DNA, 1383 bp, Escherichia coli
atggctactggaaagattgtccaggtaatcggcgccgtagttgacgtcgaattccctcaggatgccgtaccgcgcgtgtacgatgctcttgaggtgcaaaatggtaatgagcgtctggtgctggaagttcagcagcagctcggcggcggtatcgtacgtaccatcgcaatgggttcctccgacggtctgcgtcgcggtctggatgtaaaagacctcgaacacccgattgaagtcccggtaggtaaagcgactctgggccgtatcatgaacgtactgggtgaaccggtcgacatgaaaggcgagatcggtgaagaagagcgttgggcgattcaccgcgcagcaccttcctacgaagagctgtcaaactctcaggaactgctggaaaccggtatcaaagttatcgacctgatgtgtccgttcgctaagggcggtaaagttggtctgttcggtggtgcgggtgtaggtaaaaccgtaaacatgatggagctcattcgtaacatcgcgatcgagcactccggttactctgtgtttgcgggcgtaggtgaacgtactcgtgagggtaacgacttctaccacgaaatgaccgactccaacgttatcgacaaagtatccctggtgtatggccagatgaacgagccgccgggaaaccgtctgcgcgttgctctgaccggtctgaccatggctgagaaattccgtgacgaaggtcgtgacgttctgctgttcgttgacaacatctatcgttacaccctggccggtacggaagtatccgcactgctgggccgtatgccttcagcggtaggttatcagccgaccctggcggaagagatgggcgttctgcaggaacgtatcacctccaccaaaactggttctatcacctccgtacaggcagtatacgtacctgcggatgacttgactgacccgtctccggcaaccacctttgcgcaccttgacgcaaccgtggtactgagccgtcagatcgcgtctctgggtatctacccggccgttgacccgctggactccaccagccgtcagctggacccgctggtggttggtcaggaacactacgacaccgcgcgtggcgttcagtccatcctgcaacgttatcaggaactgaaagacatcatcgccatcctgggtatggatgaactgtctgaagaagacaaactggtggtagcgcgtgctcgtaagatccagcgcttcctgtcccagccgttcttcgtggcagaagtattcaccggttctccgggtaaatacgtctccctgaaagacaccatccgtggctttaaaggcatcatggaaggcgaatacgatcacctgccggagcaggcgttctacatggtcggttccatcgaagaagctgtggaaaaagccaaaaaactttaa

SEQ ID NO: 670 - DNA, 1410 bp, Helicobacter pylori NCTC 11638
atgaaagcgatggaaggtaaaatcattcaggttttaggcccggtggtagatgtggagtttgaatcctatctgccggcgatttttgaagcactagacattaattttgaagttaatggcgttcaaaaatctttagttttagaggtggcagcccatttgggtggtaatcgggtgcgagcgattgctatggatatgacagaaggcttagtgcgtaaccaagccgtcaaagctcgtggcaaaatgattgaagtgcctgtgggcgaagaagtgttagggcgtatttttaatgttgtgggcgagagcattgataatttagagccgcttaagccgtccttaacttggcccattcacagaaaagcccctagttttgagcagcaaagcactaaaacagaaatgtttgaaaccggtattaaagtcattgacttgctcgcgccttattctaagggcggtaaagtaggcttgtttggtggggctggcgtaggcaaaacggtgatcattatggagcttatccacaatgtggcttataagcataacgggtattcggtgtttgcaggtgtgggggagcgcaccagagaagggaacgatctgtattttgagatgaaagaagggggcgttttagacaaagttgcgttgtgctatgggcaaatgaatgagccaccaggtgcaaggaatcgcatcgcattcaccggcttgacgatggcggagtatttccgtgatgaaaagggcttagatgtgttgatgtttattgataacatctttagatacgctcaaagcggtgcggaaatgagcgcgctattaggccgtatcccttcagcggtggggtatcagcccacgctagccggggaaatggggaaacttcaagagcgtatcgcttccactaaaaatggctctatcacttcggttcaagcggtgtatgtgccagcagacgacttgactgacccagcccctgcttcggtgtttgcgcatttagatgcgactacggtgttgaatagaaagatcgctgaaaaagggatttatccggcggtggatcctttggattccacttcaaggattttaagccctcaaatgattggcgagaagcactatgaaatcgccaccggtatccagcaagttttgcaaaaatacaaggatttgcaagatattattgcgattttgggattggacgaattgagcgaagaggataaaaaaacggttgaaagggccagaaaaattgagaagtttttatcccagccgttttttgtggctgaagtgtttacaggaagtcccggtaagtatgtgactctccaagagactttagagggctttggagggattttagagggcaaatacgatcacattcctgaaaacgcgttttacatggtgggcagcattcaagaggttttagaaaaagctaaaaacatgaaaaattcctaa

SEQ ID NO: 671 - DNA, 1401 bp, Clostridium acetobutylicum DSM 792
atgccagaacatgtaggtaaaattgttcaggtaataggacctgttgtggatattaaatttgatgcagagaaccttcctgacatctataattccatagaaatagatatgggagataataaaaaactcattgctgaagttgaacaacatgtaggagatgacatagtaagaacaatagcaatggaaggtactgacggattaaaaagaggaatggaagcagttaacactggtaaaccaatatctgtaccagttggagaaaatgttttaggacgtctttttaatgttttaggtcagacaatagatgaagcaggagacatgaatgctgataagtattatccaattcatagaccagctccaacctttgaagaacaatcagttcaaccagaaatgtttgaaacaggtattaaggttatagatttacttgctccatatcaaaagggtggaaaaatcggtttgttcggtggtgccggtgttggtaaaacagttcttattcaggaacttataaataatatagcaaaagaacacggtggattatcagtattcacaggtgttggagaaagaacaagagaaggtaatgacctttattatgaaatgaaagattcaggagttataaataaaacagctctagtatttggtcagatgaatgaaccacctggcgctagaatgagagttgctttaacaggacttacaatggctgaatattttagagacaaaggtcaagatgtgcttctatttatagataatatattcagatttacacaagctggttcagaggtttcagctttacttggtagaatacctagtgccgttggttatcagccaacacttgcaaatgaaatgggtgctcttcaagagagaataacatcaacaaaacagggttcaatcacatccgttcaggctgtatatgttcctgctgatgaccttacagacccagctccagcaacaacatttacgcatcttgatgcaacaacagttctttcaagagaaatatcaaacttaggaatatatcctgcagttagtcctcttgaatcaacttcaagaatacttgatccaagaattgttggagaagagcattatgaagttgctaacaaggttaaacatatacttgaaagatatcaagaacttcaagatatcatagctatacttggtgttgatgaactttcagatgaggatagattgttagttggaagagcaagaagagtacagagattcttatctcaagcttttagtgttgctgaacaatttacaggaatgaaaggtcagtttgtacctgtaaaagatactataagaagttttaaagaaatattagatggtaagtgtgatgatcttccagaagctgcatttttatttgcaggaacaatagaagatgtaaaagaaaaagctaaaaaaatgatggaaagctaa

SEQ ID NO: 672 - DNA, 1509 bp, Cytophaga lytica DSM 2039
atgtctaaagttacaggtaaagtttcccaaattattggcccagttatagatgtggagttccaagcaggggtagatcttccaaaaatttatgattcattagaaattaaaaaagcagatggatcaattttggttttggaagtacaatcacacattggtgagaacacagtaagaactatatctatggattcttctgatggtttaagtcgtggagcagaggttaatgcaacaggaagcgctatacaaatgccagttggagatgacgtttacggacgtttatttaacgtaattggagacgctattgatggtcttgggaatttaccaaaatctggtaaagatggtttgccaatacacagagaggcaccaaaatttgaagacttatctacttctacagaagtattatttacaggtattaaagtaattgaccttattgagccttatgcaaaaggtggtaagattggtttatttggaggtgccggagtaggtaaaacagtattaattcaggaattaattaacaacattgcaaaaggtcacggtggactttctgtatttgctggtgtaggtgagcgtactcgtgagggtaacgatttactacgtgagatgttagagtctggtattattaaatacggagatgactttatgcactctatggaagaaggtggttgggatttatctaaagttgataaatctgtaatgaaagattctaaagcaacctttgtatttggacaaatgaatgagccaccaggagcacgtgcacgtgttgcattatctggtttaactattgcagaatatttccgtgatggagcaggtgaaggtcaaggtaaagatgtacttttctttgtggataacattttccgttttacacaagctggttctgaggtatctgcattacttggtcgtatgccatctgcggtaggttaccaaccaacattagcaacagaaatgggtgctatgcaagagcgtattacatcaacaaaaagaggttctattacatctgtacaggcggtttacgtacctgcggatgatttaacggatccagcaccggcaactacctttgctcacttagatgcaacaacggtattgtctcgtaaaattgcagagttaggtatttacccagcggtagatccattagattctacttctagaatcttagctccagaaattttaggaaaagatcactactcttgtgcacaacgtgtaaaagagttgttacaacgttataaagaattacaagatattattgctatccttggtatggaagaattatctgaggaagataaaatggcagttggtagagcaagacgtgtacaacgtttcttatctcagcctttccacgtagcagagcaatttacaggtcttaaaggtgttttagtagatatcaaggatactattaaaggatttaatatgattatggatggtgaattagatcacttaccagaatctgcatttaaccttaaaggtactattgaagaagctatagaagcaggagaaaaaatgcttgctgaagcataa

SEQ ID NO: 673 - DNA, 819 bp, Ehrlichia risticii strain HRC-IL
cctaaaatatatgatgcattatatgtaaaactagataatgaaaatttgtgtttagaagtttcacaaattattggagataatgttgttagatgtattgcaatgggagctacttatggattaaatcgtggtttagaagtagtttgttcaggaaatccaattcaggttcctgtaggtgaacaagttttaggtagaatgtttaatgttgttggtaaaacaattgacaatcttgaatctttagatgataaaaatataaaaatgatgccaattcatcgaaatccaccatcatttgaagagcaatccaatgaaattgaaatttttgaaacaggcattaaagttattgatttattaattccatatgctaaaggtggtaagattggattatttggtggagcaggggttgggaaaacggttcttgttcaagaattaattcacaatatcgcaaaaggtcatggtggtctatctgtttttgctggagttggtgaaagaactcgtgaaggtaatgacttgtattatgaaatgattgaaggtggagttatagataaaacagccttagtgtttgggcaaatgaatgaacctcctggcgcaagaatgcgcgtagcattaactgctttaacaatggctgaatatttccgtgatgttcaaaaccaagatgttttgttatttattgataatatctttagatttacacaagctggtagtgaagtttcagcattattaggaagaatgccatctgctgttggttatcaaccaactttggcatatgaaatgggattgttacaagaaagaatcacttccactaaaagtggttctataacatct

SEQ ID NO: 674 - DNA, 840 bp, Vibrio cholerae ATCC 25870
agagcgaagtaccaagtgtttacgatgctctgaatgttgtggattccaaagaacgtctggttctggaagttcaacagcagctaggcggtggcgtgattcgcgctatcgttatgggtagctcggatggtttacgtcgtggaatgacagtacaaaacactggcgctccaatttcagtaccagtaggtactaaaaccctaggtcgtatcatgaacgtgcttggtgatgcgattgacgaacgtggcgacattggcgcagaagaggtgtactcgattcaccgtcctgctccaagctacgaagaacagtctagtgcaactgaacttttggaaacgggtgttaaggttatcgacctgatctgtccgtttgcgaaaggcggtaaaatcggtctgttcggtggtgcgggtgtaggtaagaccgttaacatgatggaacttatcaacaacatcgcgctacagcactcaggtttgtcagtatttgctggggtaggtgagcgtactcgtgagggtaacgacttctaccacgaaatgcaggaagcgggcgttgtaaacgttgaacaaccagaactgtcgaaagtagcgatggtttacggtcagatgaacgagccaccaggcaaccgtctgcgtgtagcactgactggtctgactatggcggaaaagttccgtgatgaaggccgtgacgtactgctgtttatcgacaacatctaccgttacaccctagcgggaacggaagtatctgctctgcttggccgtatgccttcagcggtaggttaccaaccaacactggctgaagagatgggtgttctgcaagaacgtatcacgtcaaccaaaaaaggttctatcacct

SEQ ID NO: 675 - DNA, 828 bp, Vibrio cholerae ATCC 25870
cggcggtatcctagttgtagcggcaactgacggtccaatgccacaaactcgtgagcacatcctgctgggtcgccaagtaggtattccttacatcatcgtattcatgaacaagtgtgacatggttgacgatgaagagcttctagagctggtagagatggaagttcgtgagctgctgtctgagtacgatttcccaggtgatgacctgccagtaatccaaggttcagcactaggcgcgctaaacggcgaagcacagtgggaagcgaagattgttgagctagcagaagcactggatacttayattccagagccagagcgtgcagtagacatggcattcctgatgccaatcgaagacgtattctcaatccaaggtcgtggtacagtagtaactggccgtatcgagcgcggcatcctgaaagtgggtgacgaagtagcgatcgttggtatcaaagagacagtaaaaacgacctgtacaggtgtagagatgttccgtaagctgcttgacgaaggtcgtgcaggtgagaacgtaggtgcactrctacgtggtactaagcgtgaagaagtagagcgtggtcaagtactggcgaagccaggttcaatcacaccacacactaagttcgaatcagaagtatacgtactgtcaaaagatgaaggtggccgtcatactccattcttcaaaggttaccgtccacagttctacttccgtacaactgacgtaacaggcagcattgagctaccagarggcgtagaaatggtaatgccaggcgacaacgtgaagatggttgtagacctgattgcaccaatcgcgatggacgaaggtctacgcttcgc

SEQ ID NO: 676 - DNA, 1298 bp, Leishmania enriettii ATCC 50120
cttctcggatggcgtgccgccggtgctgacggcgctggacgtgacggaggaactcgggcgcgacgagccgctgacgctagagatcgtgcaacacttggacgcgcacaccggccgctgcattgcgatgcagacgacggacctactgaagctgaagtcgaaggtcgtgtcgaccggcgggaacatctctgtgcctgtgggccgcgagacgcttggccgcatcttcaacgtactgggcgacgcgattgaccagcgcggccccgtgggcgagaagatgcgcatggcgatccacgcggaggcgccgaagctggcggaccaggcggcggaggacacgatcctgacgaccggcatcaaagtgatcgatctgatcctgccgtactgcaagggcggcaagatcggtctgttcggcggtgccggtgtggggaagactgtgatcatcatggagctgatcaacaacgtcgcgaagggccacggtggcttctccgtgttcgccggcgttggggagcgcacccgcgaggggacggatctgtacctggagatgatgcaatcgaaggtgatcgacctgaaaggtgagtcgaagtgtgtgcttgtgtacgggcagatgaacgagcccccgggtgcgcgcgcgcgcgttgcgcagtctgcgctgacgatggccgagtacttccgcgacgtggagggccagaacgtgctgctgttcatcgacaacatcttccgcttcacgcaggcgaactccgaggtgtcagcgctgctgggccgcatccccgccgctgtgggctaccaaccgacgcttgcggaggatctcggcatgttgcaggagcgcatcacgtcgacgacgaaggggtcgatcacgtctgtgcaggcggtgtacgtgcctgcggatgatatcacggatcccgcgccggcgacgacattctcgcacctggacgcgacgacggtgctggaccgcgcggtggcggagtctggcatctaccccgcggtcaacccactggagtgcgcgtcgcgtatcatggaccctgatgtgatcgacgtggatcactacaacgttgcgcaggacattgttcagatgctgaccaagtacaaggagctgcaggatatcattgcggtgcttggtatcgacgagctgagcgaggaggacaaggttgtggtggaccgtgcgcgcaaggtgacccggttcctgtcacagccgttccaggttgcggaggtgtttactggcatgacaggccattacgtacagctgagcgacacggtggagtcgttctccggtttgctgatggggtcgtacgaccagattccggaga

SEQ ID NO: 677 - DNA, 1083 bp, Babesia microtti strain Persing-1
caagctcaagtctgagcgtgagagaggtattactattgacattactctctggaaatttgagacccagaaatacgagtacactgtcatagacgcacctggtcatcgtgactttatcaaaaatatgattactgggacttcacaagccgacgttgctatgcttgtcgttcctgctgaatctggcggattcgaggctgctttttccaaagaaggtcagacccgtgaacacgccttactagccttcacacttggcgtcaaacagatgattgttgctattaacaaaatggattcttgtcagtacaaggaggatcgttatatggaaattttcaaggaagtacagcagtacttgaagaaggtgggttacaaagttgaaagcgtgccgtttgttgctatttcaggattccacggtgacaacatggttgaaaaatctactaacatgccttggtataagggtaagaccctcgtagaggcacttgatcaaatggagcctccaaaacgtccggtcgaaaaacctcttagattgcccctgcagtcagtctataaaattggaggtattggtacggtaccagtcggaagggtcgaaacaggacaactgaaagcaggaatgatcattacttttgcccccactggtttgaccactgaatgtaaatctgttgaaatgcatcacgaggttgtggaagtggctagccccggtgataacgttggatttaatgtcaagaatgtgtctgttaaggatattaagagaggaaatgtggcttcggattcgaaaaatgacccagccaaggaagctacctctttctctgcacaagtcattgtactcaatcaccctggtaccatcaaggccggttactcacctgtggttgattgccatactgcccacattgcttgcaaattcgaatctctagacactaggattgacaagcgtactggcaagactttggaagaaaatcctaagactattaagaatggtgacgctgccatggtgactatgaaaccaaataaacccatggttgtggaaactttcaccgactacgccccgttgggccggttcgccgtgcgtgatatgcgccaaaccgttgccgtcgg

SEQ ID NO: 678 - DNA, 551 bp, Cryptococcus neoformans strain Lev-12
tgtgctcattcaggagctcattaacaacattgccaaggctcacggtggttactctgtcttcactggtgtcggtgagcgaactcgtgagggtaacgacttgtaccacgaaatgagggagactggtgttatcaaccttgagggtgactccaaggtcgctcttggtgagttcttttttttcttcaggctaattagtcgatgacgtgggccctgactaaaactgtttcttccagtcttcggtcagatgaacgagccccctggagcccgtgcccgagttgcccttactggtttgaccattgccgagtacttccgtgacgaggaaggccaggatgtgttgcttttcattgacaacattttccgattcacccaggccggttccgaggtgtctgccttgctcggtcgtatcccctctgccgtcggttaccagcccactctttccaccgacatgggtggtatgcaggagcgaatgtaggttgcattctctgtgattttacggcaagccttgactttttttttctagtaccaccaccaagaagggttccattacctccgtc

SEQ ID NO: 679 - DNA, 552 bp, Cryptococcus neoformans ATCC 44104
tgtgctcattcaggagctcattaacaacattgccaaggcccacggtggttactccgtcttcaccggtgtcggtgagcgaactcgtgagggtaacgacttgtaccacgaaatgagggagactggtgttatcaaccttgagggtgactccaaggtcgctcttggtgagttcttttttttgggagctaattagtcgatgacgtgggccctgaccaaaaccgtttctttcagtcttcggtcagatgaacgagccccctggagcccgtgcccgagttgctcttactggtttgaccattgccgagtacttccgtgacgaggaaggccaggatgtgttgcttttcattgacaacattttccgattcacccaggccggttccgaggtgtctgccttgctcggtcgtatcccctctgccgtcggttaccagcccactctttccaccgatatgggtggtatgcaagagcgaatgtaagttgcattttttgtgattttacggcaagtcttgacttacatttttttctagcaccaccaccaagaagggttccattacctccgtc

SEQ ID NO: 680 - DNA, 1018 bp, Cunninghamella bertholletiae ATCC 42115
tctccctgctattttaaacgctcttgaagttaaggatcatgctggtggtcgtcttgttcttgaagttgctcaacacttgggtgaaaacactgtacgtactattgctatggatggtactgaaggtaagtttatttttagatgatcataaataattgatcataatgataaaaaaaaaagaagaagaagaacaggatgtatataatggttaataaataatattttcatattgkatataactatttaatctgtttttttttcttcatgattatatatatatatgtmctaatatctaatatgaaccttttttataaaattaatcaggtcttgtccgtggtcaaaaggttgttgatactggtgctcctattaccattcctgttggtaaggaagttcttggtcgtatcatcaacgttattggtgaacccattgatgaacgtggtcctattaaggccaagtctcaccgtgctattcacgctgaagctccagaattcgttgatcaatctcctactcccgaaattcttgaaactggtattaaggttgtcgatttattagctccttatgctcgtggtggtaagattggtcttttcggtggtgctggtgtaggtaaaactgtcttgattcaagaacttattaacaacattgctaaagcccatggtggttactctattttctgtggtgttggtgaacgtactcgtgaaggtaacgatttataccacgaaatgatggaaactggtgtcattaaacttgaaggtgactccaagtgtgctcttgtattcggtcaaatgaacgaacctcctggtgctcgtgcccgtgttgctttaactggtttaaccattgctgaatacttccgtgatgaagaaggtcaagatgtgttacttttcattgataacattttccgtttcactcaagctggttctgaagtatctgcccttttaggtcgtattccatctgctgtaggttaccaacccactttatctactgatatgggtggtatgcaagaacgtattactactaccaagaa

SEQ ID NO: 681 - DNA, 23 bp, Artificial Sequence
  Synthetic DNA Sequence
  modified_base (3): i
  modified_base (6): i
  modified_base (12)..(13): i
  modified_base (15): i
  modified_base (18): i
ggnssnttyggnnsnggnaarac

SEQ ID NO: 682 - DNA, 26 bp, Artificial Sequence
  Synthetic DNA Sequence
  modified_base (3): i
  modified_base (6): i
  modified_base (21): i
  modified_base (24): i
gtnacnggytcytcraarttnccncc

SEQ ID NO: 683 - DNA, 26 bp, Artificial Sequence
  Synthetic DNA Sequence
  modified_base (3): i
  modified_base (6): i
  modified_base (9): i
  modified_base (12): i
  modified_base (15): i
  modified_base (21): i
  modified_base (24): i
gtnacnggntcnswnawrtcnccncc

SEQ ID NO: 684 - DNA, 3267 bp, Candida tropicalis
atggctggtgctttagaaaacgcaagaaaagaaattaaacgtctttcattagatgacaccaatgaatcccaatatggtcaaatctattctgtttccggtccggttgttattgccgaaaacatgattggatgtgccatgtacgaattggttaaagttggtcatgataatttagttggggaagttattagaattaatggtgataaagcaaccattcaagtttatgaagaaactgcaggggtcactgttggtgatccagttttaagaactggtaaaccattatctgttgaattaggtcctggtttaatggaaactatttatgatggtattcaaagacctttaaaagccattaaagatgaatcccaatctatttatatcccaagaggtattgatgttcctgctttatcaagaactgttcaatatgatttcactccaggtcaattgaaagttggtgatcatatcactggtggggacatttttggttctatttatgaaaactctttattggatgaccataagattttgttacctccaagagcaagaggtactattacttctattgctgaagccggttcttataatgttgaagaaccagttttggaagttgaatttgatggtaagaaacataaatactctatgatgcatacatggccagttagagttccaagaccagttgctgaaaaattgactgctgatcatccattgttgaccggtcaaagagtcttggattctttattcccatgtgttcaaggtggtactacttgtatcccaggggcttttggttgtggtaaaactgttatttctcaatctttgtccaaattctccaactctgatgttattatctatgttggttgtttcactaaaggtactcaagtcatgatggctgatggtgccgacaaatctattgaatctattgaagttggtgacaaagtcatgggtaaagatggtatgccaagagaagttgttggcttaccaagaggttatgatgatatgtacaaggttcgtcaactttctagtactagacgtaatgctaaatccgaaggcttgatggatttcactgtttctgctgatcataaacttatcttgaaaactaaacaagatgtcaagattgctacacgtaaaattggtggcaacacctatactggtgttactttctatgttttggaaaagactaagactggtattgaattagttaaagccaagactaaagttttcggtcatcatatccatggtcaaaatggcgctgaagaaaaagctgctacttttgctgctggcattgactctaaagaatacattgattggatcattgaagctagagattatgtacaagttgatgaaattgtcaagaccagcaccactcaaatgatcaacccagttcattttgaatctggtaaactcggtaactggttacacgaacacaagcaaaacaaatcacttgctccacaattgggttacttgttgggtacttgggctggtattggaaatgttaaatcttctgctttcaccatgaactccaaagatgatgttaaattagctacaagaattatgaactactcttcaaaattgggcatgacttgttcttctactgaatccggtgaactcaatgtcgctgaaaacgaagaagaatttttcaataaccttggtgctgaaaaggatgaagctggtgatttcacttttgatgaatttaccgatgctatggatgaattgactatcaatgttcatggtgcagctgcaagcaagaagaacaatttgttgtggaatgctttgaaatctcttggtttcagagccaagtctactgatattgtcaagagtattcctcaacatattgctgttgatgatattgttgtcagagaatctttgattgccggtttagttgatgctgctggtaatgttgaaaccaaatccaatggttctattgaagctgttgttagaacttctttcagacatgtcgctagaggtcttgtcaagattgctcattctttgggtattgaatcatctattaatattaaagatactcacattgatgctgctggtgttagacaagaatttgcttgtattgtcaatttgactggtgctccacttgctggtgttctttctaaatgtgcacttgcaagaaaccaaactccagttgtcaaatttaccagagacccagttttgttcaactttgatttgatcaaatctgcaaaagaaaactattatggtattactttggctgaagaaactgatcatcaattccttttatccaacatggccttggtgcacaactgtggtgaacgtggtaatgagatggctgaagttttgatggaattcccagaattgtttactgaaatttctggtagaaaagaaccaattatgaaacgtaccactttggttgccaatacttctaatatgccagtcgctgccagagaagcttctatttatactggtattacattggctgaatatttcagagatcaaggtaagaatgtttctatgattgctgattcttcttcacgttgggctgaagctttgagagaaatttctggtagattgggtgaaatgcctgctgatcaaggtttcccagcttatttgggtgctaaattggcttctttctatgagcgtgccggtaaagccactgctttgggttcaccagatagagttggttcagtttctattgttgctgctgtttctccagctggtggtgatttctctgatccagttactacttctactttgggtattactcaagttttctgggggttggataagaaattggcccaaagaaaacatttcccatctattaacaccagtgtttcttattctaaatacaccaatgttttgaacaaatactatgattccaactatccagaattcccacaattgagagacaaaattagagaaattttatctaatgctgaagaattggaacaagttgttcaattagttggtaaatctgcattgtctgattctgataagattactttagatgttgctaccttgattaaagaagatttcttgcaacaaaatggttattcttcatatgatgcattctgtccaatttggaagacttttgatatgatgagagcatttatttcatattatgatgaagcacaaaaagcaattgccaatggtgctcaatggtctaaattagctgaaagtactagtgatgttaaacatgctgtttcttcagctaaattctttgaaccatcaagaggtcaaaaagaaggtgaaaaagaatttggagatttattaaccactatctccgaaagatttgctgaagcttcagaataa

SEQ ID NO: 685 - DNA, 1782 bp, Enterococcus hirae ATCC 9790
ttgcaaattggaaaaatcataaaagtctccggtcctctcgttatggcagaaaatatgtcagaagcaagtattcaagacatgtgtttagtgggagatttaggagtcatcggcgaaatcattgagatgcgtcaagatgtggcgtctattcaagtatatgaagaaacttcaggaattggtcccggagaacctgttcgttccactggggaagcactatctgttgagctaggaccaggaatcatttcacaaatgtttgacgggattcaaagaccactggatacatttatggaagtgactcaaagtaacttcttaggacgtggggtccaattaccagctttagatcatgagaaacaatggtggtttgaagcgacaatcgaagaaggaacagaagtaagtgctggagacatcattgggtacgtggatgaaacgaagatcattcagcacaaaatcatggtccctaatggtatcaaaggaactgtacaaaaaattgaatctggatcatttacgatcgatgatccgatttgtgtgatcgaaacggaacaaggcttaaaagagctgacgatgatgcaaaaatggccagtacgtcgtggtcgaccaatcaaacaaaaattaaatccagatgtaccgatgatcaccggtcaaagggtcattgacacgtttttcccagtaactaaaggaggagcggcagccgttccaggtccgtttggtgcagggaagacagttgtgcaacaccagattgctaagtggtcggacgtagatctagtggtttacgttggttgtggggaacgaggaaatgaaatgacggatgtcgtcaatgaatttcctgaactgatcgatccaaatacaggcgagtctttgatggaacgaactgtgttgatcgctaatacatcgaacatgccagtagctgctcgagaagcttctatttatacgggaatcacgattgccgagtacttccgtgacatggggtatgatgtagcaatcatggcagattccacttctcgttgggcagaagcactgcgtgaaatgagcggacgtttagaagaaatgcctggtgatgaaggttatcccgcttatctgggctctcgtctagctgaatactatgaacgttcaggacgtgtcattgctctaggctctgaccaacgtgagggcagtatcactgccatcagtgcggtttctccttctggtggagatatctctgaaccagtgactcaaaataccttacgtgtggtgaaggttttctggggattagattctagtcttgctcaaaaaagacattttccatcgattaactggatccaaagttactcattatattcaacagaagttggcagatatatggatcaaatcttacaacaggattggtctgatatggtaactgaaggcatgcggatcttgcaagaagaagaacaattaaatgaaatcgtgcgcttggtagggatcgattcgctttctgataacgatcgcttgacccttgaagtagcaaaatcgattcgagaagactatttacaacaaaatgcttttgatgatgtagatacgtttacttcaagagaaaaacaattcaacatgttgaaagttattttgacttttgggaaagaagctcgaaaagccttatcgttgggagcgtacttcaatgaaatcatggaaggtacagtagcggtcagagaacgcattagtcggagcaagtatattccagaagaagagttagccaaaattagtagtataaatgaagaaatcaaagaaacgatccaattgattgtttcagaaggagggatgaccgatgattaa

SEQ ID NO: 686 - DNA, 1781 bp, Chlamydia pneumoniae strain CWL 029
cagggacatgttatagaagcttatggaaacttgttacgtgtacgctttgacggatatgttagacaaggtgaagttgcatatgtcaacgtagataatacctggttaaaagcagaagtgattgaagttgctgatcaagaagtcaaggttcaggtatttgaagatacacaaggcgcgtgtcgaggagctcttgttacgttttcaggacatcttttagaagccgagttagggcctggcttgcttcagggcattttcgatggacttcaaaatcgtcttgaggtgctagctgaagatagttctttcttgcagagaggcaagcatgttaatgctatttctgatcataatttatggaattatactcccgtagcttctgttggggatactttaagacgaggagatcttctaggaacagtacctgaaggacgatttactcataagattatggttcctttttcttgctttcaagaggttaccctgacttgggtaatttctgaaggaacctataatgctcatactgtggtcgcaaaagctcgagatgctcagggtaaagaatgtgcctttactatggtgcaaagatggccgatcaaacaagcttttattgaaggagagaagatccctgcgcataagattatggatgtgggtttgcgaatcttagatacgcaaattccagtattgaaggggggaactttctgtaccccaggaccttttggtgcagggaaaacagtcttacaacaccatctttctaagtacgctgctgtagatattgtgattttgtgtgcgtgcggagagcgtgctggtgaagttgttgaggtattacaagagttccctcatcttatcgacccccataccggaaagtctttaatgcacagaacatgtattatttgtaacacatcatccatgcctgtggctgcccgagagtcttcgatctatttaggagtgacgattgcagaatactatcgccagatgggactagatattctgcttttagctgattctacatcccgatgggcacaagcccttagagagatttcgggacgtcttgaagaaatccctggagaggaagcatttcctgcatacctgtcttctagaatagctgctttttatgagcgaggaggagctatcaccacgaaagatggttctgaaggatctttaactatatgtggtgcggtgtctcctgcaggaggaaactttgaagaaccagtcactcaatctacattagctgtagtcggagcgttctgtggtctttcaaaagcacgagctgacgcacgtaggtatccttcaatagaccctttgatttcttggtcaaaatatttgaaccaggtaggacaaattttagaagagaaggtttcaggctggggtggtgctgtgaaaaaagcagcacagtttctagagaaaggttcagaaatcggcaagcgtatggaagttgtcagtgaagaaggggtttctatggaagacatggaaatctacttaaaggcagaactttatgatttttgtkatctccagcagaacgcattcgatcctgtggactgttattgtccttttgagagacagatagagttattttcattaatcagtcgtatttttgatgctaaatttgtttttgatagtcctgatgatgcaagaagctttttccttgagctgcagagcaagattaagacattaaatggcctgaaatttctttcagaggaatatcatgagagtaaagaggtcatagttagactgttggaaaaaacaatggtacaaatggcgtaaggatatgcaaacaatctacacaaaaataactg

SEQ ID NO: 687 - DNA, 1758 bp, Halobacterium salinarum
atgagtcaagctgaagcaatcactgacaccggcgaaatcgagagcgtgagcggtccggtcgtgaccgccacgggcctcgacgcgcagatgaacgacgtcgtctacgtgggcgacgagggtctgatgggcgaggtcatcgagatcgaaggcgacgtaaccaccatccaggtctacgaggagacgtccggcatcgggccgggccagcccgtcgacaacacgggcgaaccgctcaccgtggacctgggcccggggatgctggactccatctacgatggtgtgcagcgtccactggacgtcctcgaagacgagatgggggcgttcctcgatcgcggtgttgacgcacccggcatcgacctcgacaccgactgggagttcgagcccaccgtcgaggcgggcgacgaggtcgcggccggcgatgtcgtcggcaccgtcgacgaaacggtcagcatcgaacacaaggttctggtgcccccccgcagtgacggcggcgaagtcgtcgccgtcgaatccggcacgttcaccgtcgacgacacggtcgtcgagttggacaccggcgaggagatccagatgcaccaggagtggccggtccgccgccagcgccccaccgtcgacaagcagacgccgacggagccgctggtgtccggccagcgcatcctcgacggcctgttcccgatcgcgaaaggcgggacggccgcgatcccggggccgttcgggtccgggaagacggtcacccagcagtccctcgcgaagttcgccgacgcggacatcgttgtctacatcggctgtggtgagcgcggcaacgagatgacggaagtcatcgaggacttcccggagctgcccgacccccagaccgggaacccgctgatggcccgcaccacgctcatcgcgaacacgtcgaacatgccggttgccgggcgtgagtcctgcatttacacgggaatcaccatcgcggagtactaccgcgacatgggctacgacgtggcgctgatggccgactccacctcgcggtgggcggaggccatgcgggagatctcctcgcgactcgaggagatgcccggcgaggaggggtatcccgcgtacctggccgcccgcctctcggagttctacgagcgcgccggctacttcgagaacttcaacgggaccgagggctccatctcggtcatcggtgcggtgtcgccgcccggcggggacttctccgagccggtcacccagaacacgctgcgcatcgtgaagacgttctgggcgcttgactcggacctcgccgagcgccggcacttcccggcgatcaactgggacgagtcctacagcctctacaaggaccaactcgacccgtggttcacggacaacgtcgtcgacgactgggccgagcagcgccagtcggcggtcgacatcctcgacgaggaatccgaactcgaagagatcgtgcagctcgtcgggaaggacgcgctgcccgaggaccagcagctcacgctggaagtcgcgcggtacatccgcgaggcgtggctccagcagaacgcgctccacgacgtggatcgctactgcccgcccgagaagacgtacgccatcctctccggcatcaagacgcttcacgaggagtcctttgaggcgttggacgccggtgtgccagtcgaggagatcacgtcgatcgacgccgcgccgcgcctgaatcgtctcggcacgacgcccgacgacgagcacgaggcggaggtcgcggagatcaaacagcagattaccgagcagcttcgggagctctactga

SEQ ID NO: 688 - DNA, 3118 bp, Homo sapiens
gaattccggcagctgactagtcttgtgattggggtcctgggctgataaaatcattccaaatgacgagcacattgataaagacgtccgatgaggaccgggagtccaaattcggctttgtttttgccgtatctggacctgtggtgacagctgaacgaatggccggttctgctatgtacgaactggtgcgtgtcggttattatgaactggtcggagagatcatccggttggagggtgacatggcaacaatccaagtatacgaagacacctcaggtgtgacagtaggcgatcccgtgctgcgcacaggcaagccgctgtccgtggaactgggacccggaatcatgggcagcatcttcgacggtatccagcgaccgctgaaggatatcaatgaactgtcaaatagtatctacatcccgaaaggtgtcaatgtgcctgccctgagtcgcactgcacagtgggacttcagtcccgtcagtgtcaaggttggaagccacattactggtggtgacctgtacggtttggtccacgaaaatactctggtgaaacacaagttgctgctgccgccccgtgccaagggaactgtcacgtacattgcagaacctggaaactacacagttgatgatgttgtcctggagacagaatttgacggcgagcgatcaaagttcaccatgctgcaagtgtggcctgtacgtcagcccaggcctgttacagaaaagttgccagctaactaccccctccttactggccagcgtgtgctcgactccctattcccgtgtgtccagggtggaacaacagctattcctggggccttcggatgtggcaagactgtaatatcacagtctttgtcaaaatactcaaactccgatgtaattatctatgtaggttgtggtgagcgaggtaatgaaatgtcagaagtactcagggatttcccgcagttgtcgttggagattgatggtgtgactgaatcaatcatgaagagaacagccctggtcgcaaacacatcaaacatgcctgtggctgctcgagaagcatctatctacacaggtattacactgtcagaatacttcagggacatgggttacaatgtatccatgatggctgactcaacttcacgatgggccgaagctcttcgagaaatctcaggtcgattggctgaaatgcctgccgacagcggttatcccgcctacctaggtgcacgacttgccagtttctacgagcgtgccggccgtgtgaagtgcttgggtaacccagacagggagggctccgtgagtatagtgggcgccgtgtcgccgcccggtggagacttctcagatcccgtgacgacggccacactaggtatcgtccaggtgttctggggtctcgacaagaaacttgcccagcgaaagcacttcccatccatcaactggctcatctcgtacagtaaatacatgcgtgctctggatgacttctacgacaagaatttcccagagtttgtcccactgcgtacaaaggtgaaggagattttgcaggaggaagaagacctgtctgaaattgtgcagttggtcggtaaagcttcattggcagaaactgacaagatcacacttgaggttgccaaactattaaaggatgatttcctgcaacagaacagctattcaccatatgaccgtttctgcccattctacaagacagtaggaatgctgaaaaatatgattgctttctacgatatgtctcggcatgcagttgaatctactgctcagagcgagaacaagatcacttggaatgttattagagattctatgggcaatattctgtatcagctttcctccatgaaattcaaggatccagtcaaggatggagaagcgaagatcaaggcagactttgagcagcttcatgaagacattcagcaagccttcaggaacctggaggattaaagtggtagctgccagtggttctctcggtgcagttgtcacatttggcaagctctgtagggttgccgagtggcatcggtgctagacacctgagcattcctttgccacataaagactaaagcaggtggaatttcagttgtaaaaagctggttccattggtgctaagattatgttgtgcccttttctgcttctcacattccaacagaggaatttacttccagttttcttccattttcctcctcattttaagtgtcggtacagaggcaataatctgataactctgtaccgtcacttacaagcagggagaatttgtaattattacaaatcccattatctctgtgcaccacagccttgtaaattcatttgtcccaggactccctcttgtgtgtacgtgagattgccgtctgtatgtatgtacacaccgtactgcagtatttgaagtcagtcagaaggtgaattacaccacttactcattgtgtcacgtagcaagtgtgcaaactgccatccattgtcctatttattcacataactagttttctttgcatttccagtgttgcaaattgtgtttagaaaattatgccatcgagactggtcgaacctcacattgtaactcagtatttacacacacgtttacttgctacagaaatgtagaaaaaataattgttgtatattgaaagtacaagtgacaaagttgcatttaaaatggtgaatgtattttatatttcttttgtagacacaagagttaatgcattttgcttaatggagatgtatgtaaacctaaaatagcagtttgtgcacaaattatgtatatgtgaaatggagatggtttctaatttgctgattgattgccagtattaatttaaacaactgtagttgtgggatgtagtgggaagattttttttttcctataaaattggtggatgtatgtgtcggagattttgattgtatgtgtaaaatagtgatcccagtaactgtaaagctttagaatacagttactgactgtatagttgtacaggtgttgttacttttaagaatttattgacacaaaggtgaaagtctattattgtattgtaatgtttaaagcatttaaggtttaaaaatcctacttctgtgtataaatgttaccattcctcatataacataactgtgtagaaatacagtcaacttcatgttcattagcatttcactgttgtcacataaattatgcccggaat

SEQ ID NO: 689 - DNA, 1836 bp, Plasmodium falciparum strain 3D7
atgacaaaagttgctgttgaaaaagaggaaccaggagttgtttataaggtggctggttcattagttattgctgagaatatgagtggaactcgtatgtacgagttagctaaagtaggatggaataaattggttggagaaattattagattagaagggaattatgcatatatacaagtttatgaagatacttcaggtttatctgtaggagaccctgttataaaaacaggaaatgctttatcagtcgaattgggtcctggtattttagataatatttatgatggtattcaaagaccattagaaagaatagcaaatgtgtgtggtgatgtatatatatataaaggtattgatatgacatctttagatcatgataaacaatggcaattttatgctgataagaaattaaaattaaatgatattgttactggtggagatatctttggatttgttgatgaaaataaattatttaaagaacacaaaattatggctccacctaatgctaaagggaggcttacatatattgctccagatggatcatatactttaaaagataaaatatttgaattagaatatcaaggaaaaaaatatacatatggtttatctcatttatggcctgttcgtgatcctagacctgttttagaaaaggtaacaggggatactttattattaacagggcaaagagttttagattcgttatttccaacagttcaaggaggtacttgtgctattcctggtgcatttggttgtggaaaaacttgtgtttctcaggccttatcaaaatattctaatagtgaagttattatatatgtaggatgtggtgaaagaggtaatgaaatggctgaaattttatccgactttcctgaattaactactaaagtagataatgaagatgtaggtattatgcaaagaacgtgtttagttgctaatacttctaacatgcctgtcgctgcaagagaagctagtatttatacaggtattactttatgtgaatatttccgtgatatgggttataatgctaccatgatggctgatagtacaagtagatgggcagaagccttaagagaaatttcaggacgtttagctgaaatgcctgcagatagtggttatccagcttatttaggtgctagattagcttccttttatgaacgtgcaggaaaagtcaaatgtattggttctccatctcgtataggatccattacaattgtgggtgctgtgtctccaccaggtggtgatttctctgaccctgtaactacagcaaccatgtctattgttcaagcattttgggggttagataaaaaactagctcaaagaaaacatttcccttctgttaattggtctacatccttttcaaagtatgtcagacaattagaacaatactttgataattttgatcaagatttcttatctttaagacaaaaaattagtgatattttacaacaagaaagtgacttgaatgatattgttcaactagtaggaaaggattcattatcagaagaccaaaaagttgttatggaagtagccaaaattattagagaagattttcttcaacaaaatgcatttagcgattatgattatatgtgcccattacaaaaaacagttggtatgatgagaattatttgccacttttatgctcaatgcttaagaacattacaagaatatgactcaagagaaagaaaaattggttggggatctatatataatacattaagaccaactataaataaaattacacatatgaaatttgaaaacccaaaaaattcagatgaatatttcaaaaagtattttaaggcacttgaagaagaaataacagtaggtttaagaaacttgatggaaaaatga

SEQ ID NO: 690 - DNA, 3216 bp, Saccharomyces cerevisiae strain X2180-1A
atggctggtgcaattgaaaacgctcgtaaggaaataaaaagaatctcattagaagaccatgctgaatctgaatatggtgccatctattctgtctctggtccggtcgtcattgctgaaaatatgattggttgtgccatgtacgaattggtcaaggtcggtcacgataacctggtgggtgaagtcattagaattgacggtgacaaggccaccatccaagtttacgaagaaactgcaggccttacggtcggtgaccctgttttgagaacaggtaagcctctgtcggtagaattgggtcctggtctgatggaaaccatttacgatggtattcaaagacctttgaaagccattaaggaagaatcgcaatcgatttatatcccaagaggtattgacactccagctttggataggactatcaagtggcaatttactccgggaaagtttcaagtcggcgatcatatttccggtggtgatatttacggttccgtttttgagaattcgctaatttcaagccataagattcttttgccaccaagatcaagaggtacaatcacttggattgctccagctggtgagtacactttggatgagaagattttggaagttgaatttgatggcaagaagtctgatttcactctttaccatacttggcctgttcgtgttccaagaccagttactgaaaagttatctgctgactatcctttgttaacaggtcaaagagttttggatgctttgtttccttgtgttcaaggtggtacgacatgtattccaggtgcttttggttgtggtaagaccgttatctctcaatctttgtccaagtactccaattctgacgccattatctatgtcgggtgctttgccaagggtaccaatgttttaatggcggatgggtctattgaatgtattgaaaacattgaggttggtaataaggtcatgggtaaagatggcagacctcgtgaggtaattaaattgcccagaggaagagaaactatgtacagcgtcgtgcagaaaagtcagcacagagcccacaaaagtgactcaagtcgtgaagtgccagaattactcaagtttacgtgtaatgcgacccatgagttggttgttagaacacctcgtagtgtccgccgtttgtctcgtaccattaagggtgtcgaatattttgaagttattacttttgagatgggccaaaagaaagcccccgacggtagaattgttgagcttgtcaaggaagtttcaaagagctacccaatatctgaggggcctgagagagccaacgaattagtagaatcctatagaaaggcttcaaataaagcttattttgagtggactattgaggccagagatctttctctgttgggttcccatgttcgtaaagctacctaccagacttacgctccaattctttatgagaatgaccactttttcgactacatgcaaaaaagtaagtttcatctcaccattgaaggtccaaaagtacttgcttatttacttggtttatggattggtgatggattgtctgacagggcaactttttcggttgattccagagatacttctttgatggaacgtgttactgaatatgctgaaaagttgaatttgtgcgccgagtataaggacagaaaagaaccacaagttgccaaaactgttaatttgtactctaaagttgtcagaggtaatggtattcgcaataatcttaatactgagaatccattatgggacgctattgttggcttaggattcttgaaggacggtgtcaaaaatattccttctttcttgtctacggacaatatcggtactcgtgaaacatttcttgctggtctaattgattctgatggctatgttactgatgagcatggtattaaagcaacaataaagacaattcatacttctgtcagagatggtttggtttcccttgctcgttctttaggcttagtagtctcggttaacgcagaacctgctaaggttgacatgaatggcaccaaacataaaattagttatgctatttatatgtctggtggagatgttttgcttaacgttctttcgaagtgtgccggctctaaaaaattcaggcctgctcccgccgctgcttttgcacgtgagtgccgcggattttatttcgagttacaagaattgaaggaagacgattattatgggattactttatctgatgattctgatcatcagtttttgcttgccaaccaggttgtcgtccataattgcggagaaagaggtaatgaaatggcagaagtcttgatggaattcccagagttatatactgaaatgagcggtactaaagaaccaattatgaagcgtactactttggtcgctaatacatctaacatgccggttgcagccagagaagcttctatttacactggtatcactcttgcagaatacttcagagatcaaggtaaaaatgtttctatgattgcagactcttcttcaagatgggctgaagctttgagagaaatttctggtcgtttgggtgagatgcctgctgatcaaggtttcccagcttatttgggtgctaagttggcctccttttacgaaagagccggtaaagctgttgctttaggttccccagatcgtactggttccgtttccatcgttgctgccgtttcgccagccggtggtgatttctcagatcctgttactactgctacattgggtatcactcaagtcttttggggtttagacaagaaattggctcaaagaaagcatttcccatctatcaacacatctgtttcttactccaaatacactaatgtcttgaacaagttttatgattccaattaccctgaatttcctgttttaagagatcgtatgaaggaaattctatcaaacgctgaagaattagaacaagttgttcaattagttggtaaatcggccttgtctgatagtgataagattactttggatgttgccactttaatcaaggaagatttcttgcaacaaaatggttactccacttatgatgctttctgtccaatttggaagacatttgatatgatgagagccttcatctcgtatcatgacgaagctcaaaaagctgttgctaatggtgccaactggtcaaaactagctgactctactggtgacgttaagcatgccgtttcttcatctaaattttttgaaccaagcaggggtgaaaaggaagtccatggcgaattcgaaaaattgttgagcactatgcaagaaagatttgctgaatctaccgattaa

SEQ ID NO: 691 - DNA, 1860 bp, Schizosaccharomyces pombe strain 972 h-
atggcgggaggaattgaactggccaagaaggctatcaggagcctcaaaaattacgacgagcatgaaaaccgatatggatctattttcagcgtttctggtcctgtcgttgttgcagccaatatgcttggatgttcgatgtacgaactcgttcgcgttggtcatgaagaactagttggtgaagtaattcgtatccatcaagataaatgtactattcaagtatacgaagagacgtccggtctcactgttggtgatcctgtccaacgcactggaaagccattatctgttgaattaggtcctggtttagctgagactatttatgatggtatccaacgtccgttaaagcaaattttcgacaaatctcaaagtatttatattcctagaggtattaatacagaatcacttaatcgtgagcataagtgggatttcacaccaaataaggatttacgcattggcgatcatgtatccggtggtgatgttttcggttctgtatttgaaaactctcttttcaatgatcataaaattatgttaccccctagagcccgtggtaccgtcacatatattgctgaagctggatcataccatgttgatgaaaaacttcttgaagtcgagtttaatggcaagaaacattcttttagtatgttgcatacttggcctgtccgtgctgctcgtccagttgcggacaacttaactgctaatcaacctttattgactggtcaacgtgttttggatgcgttatacccctgtgttcaaggtggcactactgctatccccggtgcctttggttgtggtaaaacagttatttcacaatctctttctaagtactctaattctgatttgattgtttacgtcggttgtggtgaacgtggaaacgaaatggcagaagtgttaatggatttcccagaactaacaattgatattaatggtaaaccagagcccattatgaagcgtactacattggtagccaacacttctaacatgcctgtcgctgctcgtgaagcttccatttataccggtattacacttgctgaatattatcgtgatcaaggtaagaacgtttcaatgatggctgattctacatctcgttgggctgaagctttgcgtgaaatttctggtcgtttggctgagatgcctgccgattctggttatcccgcttatttgggtgccaaattggcttctttttacgaacgtgctggtcgtgctcgttgcttgggaagtcctgaccgtgaaggaacagtttcaattgttggagctgtttctcctccgggtggtgatttttctgatcctgttactagtgcaaccttgggaattgttcaagtcttctggggtttggacaagaaattggcccaacgtaaacactttccctcaatcaacacctctctttcctattctaaatacatcaatgctttgcaaccttggtatgaggaaagagttccaggctttaatactcttcgtgatcaaatcaaacagatcattcaacaagaagattccatgttggaaattattcagttggttggtaagtcggctctttctgaaacggataaagttactttggacatagccggtattattaagaatgacttcttacaacaaaacggttattctgattacgatcgctgttgccctctttacaagacttatcatatgatgcgaaacatgattgcttactacacaaaggctaaaagtgccgttgaaactggtagcgttccttggtcaaagattaaagaaagtacttcagatatcttttatgagttaacctcgatgaaattcgaaaaccctaatgaaggcgagaaggaaatagtcgaacactatgaaactctgcacaagaagattgaggacaagtttcacactctgactgagtaa

SEQ ID NO: 692 - DNA, 1833 bp, Trypanosoma congolense strain IL3000
atgacgagcgataaaaacccttacaaaacagagcagcgcatgggggccgtgaaggccgtctccgggccagttgtcattgctgaaaacatgggcggtagcgctatgtatgagcttgtgcaggtaggttccttccggttagtgggcgagatcattcgtctagagggcgataccgccactattcaggtctatgaggaaacaggtggcctcactgtcggagacccggtgtactgtacgggtaagcctctttcgcttgagcttggacctggaatcatgtctgaaatatttgacggtatccagcggcctcttgacaccatctaccgcatggtggaaaacgtgtttatccccaggggcgttcaggtgaagtcactcaatgaccagaaacagtgggactttaagccatgcctgaaggttggagatcttgtgtctggtggtgatatcattggctcagtggtggagaactctctcatgtacaatcacagcattatgattccgcccaatgtgcggggccgtgttacttccattgttccttcaggaaattacaccctccaagatgacattattgaattggaatataatgggacagtgaaatcactaaaacttatgcatcgctggccagtacggaccccgcgtcctgtggcgtcaaaagaatccggcaatcatccgcttctcaccggacagcgtgtgctcgatgctctctttccatccgtccagggtggaacatgcgccatccctggcgcgtttggatgcggaaagacggttatcagtcaggctctttcgaagttctccaacagcgacgctgttatctatgtcggctgcggcgagcgtgggaatgagatggcagaggtgctcatggacttccccacactcaccaccgttattgatggtcgtgaggagtccatcatgaagcgtacctgcctggtggcaaacacctcaaatatgcctgtcgctgctcgtgaggcgtctatttacactggcatcactttagctgagtattatcgtgatatgggcaagcacattgctatgatggccgactctacctctcgatgggctgaggctctccgtgagatctctgggcgtctcgctgaaatgcccgctgatggtggttaccctgcgtacctcagtgcgcgtcttgcttccttctacgagcgtgcggggcgcgtgacatgcatcggtgggccaaaacgcgagggctcagtaaccatcgttggtgccgtttctcctcctggaggtgacttttctgacccagtgacgtccgctacgcttggtattgtgcaagtcttttggggtcttgagaagcgtcttgcgcaacgtaaacactttccttctgttaattggctcatttcctattcaaaataccttaatgctttggagcccttcttcaacacgcttgaccctgactacatgcgcctgcggtcagttgctgcggagatccttcagcgtgaggaagagttgcaagaaattgttcaacttgtcggtaaggactcactttcggagtctgacaaaattattctagaaacggctaaggttattcgtgaagagtttctccagcagaatgcctttacgccgtacgacaagtattgcccgccgtacaagacctgctggatgctacgtaacattgtcgcgttctacgaggagagccagcgcgttgtagctgagtccgctggggaacttaagattacgtggaactacattcgtgaaatgattcctcatatttacacgggtttaactgagatgaagttccgtgatcctcaggagggtgaggaggccaacgtagaattctacagaaaacaaaatgaggaaattgtcagcgcattcgcctcgctgctgcaataa

SEQ ID NO: 693 - DNA, 1758 bp, Thermus thermophilus strain HB8
atgatccaaggggtgatccagaagatcgcgggcccggcggtgatcgccaagggcatgctcggggcccgcatgtacgacatctgcaaggtgggcgaagagggcctcgtgggcgagatcatccgcctggacggggacacggccttcgtccaggtctacgaggacacctcgggcctaaaggtgggggagcccgtggtctccacgggccttcccttggcggtggagctcggccccgggatgctgaacggcatctacgacggcatccagcgccccctggagcgcatccgggagaagacggggatctacatcacccggggcgtggtggtccacgccctggaccgggagaagaagtgggcctggacgcccatggtcaagcccggggacgaggtgcgggggggtatggtcctgggcacggtgcccgagttcggcttcacccacaagatcctggtacccccggacgtgcggggccgggtcaaggaggtgaagcccgccggggagtacaccgtggaggagccggtggtggtcctcgaggacggcaccgagctcaagatgtaccacacctggcccgttcgccgggcgaggcccgtgcaaaggaagcttgaccccaacacccccttcctcacggggatgcgcatcctggacgtcctcttccccgtggccatggggggcaccgccgccatccctgggcccttcggcagcggcaagaccgtgacccagcagtccctggccaagtggtccaacgccgacgtggtggtctacgtgggctgcggggagcgggggaacgagatgaccgacgtgctcgtggagttccccgagctcaccgaccccaagacgggtgggcccttgatgcaccgcaccgtcctcatcgccaacacctccaacatgcccgtggccgcccgcgaggccagcatctacgtgggcgtgaccatcgccgagtacttccgcgaccagggcttctccgtggccctcatggccgactccacgagccgctgggccgaggctttgcgcgagatctctagccgcctcgaggagatgcccgccgaggagggctacccgccctacctcgccgccaggctcgccgccttctacgagcgggcgggcaaggtcatcaccctgggcggcgaggagggggcggtgaccatcgtgggggccgtctccccgccgggcggcgacatgtccgagcccgtgacccagtccaccttgaggatcgtgggggccttctggcggcttgacgcctccctggccttccgccgccacttccccgccatcaactggaacggctcctacagcctcttcacctccgcccttgacccctggtaccgggagaacgtggccgaggactaccccgagctccgcgacgccatctccgagcttttgcagcgggaggcgggcctccaggagatcgtccagctcgtggggccggacgccctccaggacgccgagcgcctcgtcattgaggtgggccggatcatccgcgaggacttcctgcagcagaacgcctaccacgaggtggacgcctactgctccatgaagaaggcctacgggatcatgaagatgatcctcgccttctacaaggaggcggaggcggccatcaagcggggggtttccatagacgagatcctgcagctccccgttctggagcgcatcggccgcgcccgctacgtgagcgaggaggagttccccgcctactttgaggaggccatgaaggagatccagggggccttcaaggctggcctaaagggggagagatggaccttctga

SEQ ID NO: 694 - DNA, 21 bp, Artificial Sequence
  Synthetic DNA Sequence
  modified_base (7): i
cggcgcnatcytsgttgttgc

SEQ ID NO: 695 - DNA, 20 bp, Artificial Sequence
  Synthetic DNA Sequence
gtttcacgtgatgacgtaca

SEQ ID NO: 696 - DNA, 26 bp, Artificial Sequence
  Synthetic DNA Sequence
  modified_base (3): i
  modified_base (6): i
  modified_base (12): i
  modified_base (21): i
atnggncayrtngaycayggnaarac

SEQ ID NO: 697 - DNA, 23 bp, Artificial Sequence
  Synthetic DNA Sequence
  modified_base (3): i
  modified_base (6): i
  modified_base (9): i
  modified_base (12): i
ccnacngtncknccrccytcrcg

SEQ ID NO: 698 - DNA, 1185 bp, Escherichia coli
gtgtctaaagaaaaatttgaacgtacaaaaccgcacgttaacgttggtactatcggccacgttgaccacggtaaaactactctgaccgctgcaatcaccaccgtactggctaaaacctacggcggtgctgctcgtgcattcgaccagatcgataacgcgccggaagaaaaagctcgtggtatcaccatcaacacttctcacgttgaatacgacaccccgacccgtcactacgcacacgtagactgcccggggcacgccgactatgttaaaaacatgatcaccggtgctgctcagatggacggcgcgatcctggtagttgctgcgactgacggcccgatgccgcagactcgtgagcacatcctgctgggtcgtcaggtaggcgttccgtacatcatcgtgttcctgaacaaatgcgacatggttgatgacgaagagctgctggaactggttgaaatggaagttcgtgaacttctgtctcagtacgacttcccgggcgacgacactccgatcgttcgtggttctgctctgaaagcgctggaaggcgacgcagagtgggaagcgaaaatcctggaactggctggcttcctggattcttatattccggaaccagagcgtgcgattgacaagccgttcctgctgccgatcgaagacgtattctccatctccggtcgtggtaccgttgttaccggtcgtgtagaacgcggtatcatcaaagttggtgaagaagttgaaatcgttggtatcaaagagactcagaagtctacctgtactggcgttgaaatgttccgcaaactgctggacgaaggccgtgctggtgagaacgtaggtgttctgctgcgtggtatcaaacgtgaagaaatcgaacgtggtcaggtactggctaagccgggcaccatcaagccgcacaccaagttcgaatctgaagtgtacattctgtccaaagatgaaggcggccgtcatactccgttcttcaaaggctaccgtccgcagttctacttccgtactactgacgtgactggtaccatcgaactgccggaaggcgtagagatggtaatgccgggcgacaacatcaaaatggttgttaccctgatccacccgatcgcgatggacgacggtctgcgtttcgcaatccgtgaaggcggccgtaccgttggcgcgggcgttgttgctaaagttctgggctaa

SEQ ID NO: 699 - DNA, 26 bp, Artificial Sequence
  modified_base (3): i
  modified_base (6): i
  modified_base (21): i
  modified_base (24): i
  Synthetic DNA Sequence
gtnacnggytcytyrarrttnccncc

SEQ ID NO: 700 - DNA, 24 bp, Artificial Sequence
  Synthetic DNA Sequence
  modified_base (2): i
  modified_base (5): i
tnrtngaygtcgarttccctcarg

SEQ ID NO: 701 - DNA, 21 bp, Artificial Sequence
  Synthetic DNA Sequence
gtgttcacgatcatcgatgcg

SEQ ID NO: 702 - DNA, 20 bp, Artificial Sequence
  Synthetic DNA Sequence
ctctcgatatccgcgaagcg

SEQ ID NO: 703 - DNA, 20 bp, Artificial Sequence
  Synthetic DNA Sequence
tatggaaattcgaaacatct

SEQ ID NO: 704 - DNA, 20 bp, Artificial Sequence
  Synthetic DNA Sequence
agtgctccaattaatgttgg

SEQ ID NO: 705 - DNA, 20 bp, Artificial Sequence
  Synthetic DNA Sequence
gtacagttccaatacctgaa

SEQ ID NO: 706 - DNA, 20 bp, Artificial Sequence
  Synthetic DNA Sequence
tgaaatcttcacatccaaca

SEQ ID NO: 707 - DNA, 25 bp, Artificial Sequence
  Synthetic DNA Sequence
twaccatttcagtaccttctggtaa

SEQ ID NO: 708 - DNA, 26 bp, Artificial Sequence
  Synthetic DNA Sequence
  modified_base (9): i
  modified_base (12): i
  modified_base (15): i
  modified_base (18): i
  modified_base (21): i
  modified_base (24): i
tcrtccatnccnarnatngcnatnat

SEQ ID NO: 709 - DNA, 1656 bp, Borrelia burgdorferi
atgaatgaagttttatttgtaaagactgctggtaggaatttaaaagcagaagtaattcgtattaggggcaatgaagttgatgcacaggtttttgaattgacaaaagggatatctgttggagacctagttgaatttacagacaaacttttaacagttgaactcggaccagggcttttaactcaagtatatgatgggcttcaaaatcctttgcctgaattggctattcaatgtggattttttttagaaaggggagtatatttaaggcccttgaataaagataaaaagtggaattttaaaaaaacctccaaagttggagatatcgttattgcaggagattttttaggttttgtaattgagggaactgttcaccatcaaataatgattccattttataaaagggattcttataaaattgtggagattgtaagtgatggcgactattcgattgatgagcaaattgctgtaattgaagatgattctggtatgaggcataatattacaatgtcttttcattggcctgttaaagttcctattactaattataaggaacgccttattcctagtgaacctatgttgactcaaactagaattatagatacatttttcccagttgccaaaggtggaactttttgcattccgggtccttttggagcaggaaaaacggttcttcagcaggttacaagtcgaaatgctgatgttgatgtagtgattattgcagcttgtggtgagcgagcaggagaagtggtagaaactcttaaagaatttcccgaattaatggatccaaaaaccggcaaatctttaatggacaggacttgtattatttgtaatacatcttcaatgccagttgcagctagagaagcttctgtttatactgctattactattggtgagtattacaggcaaatgggccttgatattcttcttttggcagattcaacttcaagatgggctcaagcaatgagagaaatgtctggacgccttgaggaaattcctggcgaggaggcttttccggcatatcttgagtctgttattgcttccttttatgaaagggcaggtattgtagttcttaataatggggatattggatctgtaacagttggtggctctgtaagtcctgctggtggtaattttgaagagccagttactcaagcaactttaaaagttgtaggagcatttcacgggcttacaagagaaaggtctgatgctaggaaatttccagctattagtcctcttgaatcttggagtaaatataaaggcgttattgatcaaaaaaagactgaatatgcaagatcttttttggtgaaaggtaatgaaattaatcaaatgatgaaagttgttggagaagaaggcataagtaacgatgattttttaatttatttaaaatccgagctacttgattcgtgctatttgcagcaaaattcatttgattctattgatgctgctgttagttcagagcgtcaaaattatatgtttgatatagtttataacattcttaaaactaactttgagttttctgataaacttcaagcaagagattttataaatgagttaaggcaaaatcttttagacatgaatctttcttcttttaaggatcataagtttaataaattggagcatgctttgggtgaattgataaattttaaaaaggtaatttag

SEQ ID NO: 710 - DNA, 1818 bp, Treponema pallidum strain Nichols
gtgatcaaagacgatgtggttacaggccgtgtagtgagggtgtctggtcccattgtgtatgccgagggcctctctgcgtgcagcgtatacgatgttgtcgacgtaggggaagcatcgctcatcggagaaattatccggttggatgagagcaaggcggtcgtgcaagtatacgaggatgacacaggtatgcgagtcggggagaaggtgacaagcttgcgtcgaccactctcagtccgcttagggcctggattaatcggcaccatttatgacggtattcagcgcccacttgagcgcctcttccaagaagacggcgccttcttgcgtcctggtgcgcgttcacaaccgcttgatggctccgtacgctgggattttcgtcctcattgtaacgagcgcggtgaggccctgtgcgcggggattccgattgcacctgggtcagtgttagggaccgtgcaggagactccttctgttgtgcacactatcatggttcctcctgacatccgggggagcgtgctatcttcgttcaagggcgcaggtgcttacacaatagatgaagaaattggacgcactgatcttggtgagccgctttttctatcccagtactggccagtgcgtcgtgcgcgtcctttcagcaaaaaacttgcagtgtgtgagccactagttactggacagcgggcgattgatgttttcttccccctatcaaagggaggaacggcggctattccagggggatttggaactgggaagacaatgacgcagcatgccgttgccaagtggtgtgatgcagatattatcgtgtacatcggctgcggagagcggggcaacgagatgacagacgtgctctctgaatttcccaaactcatcgatccgcgcacaggacgctctcttatggagcggacgattttgatcgcaaatacgtccaatatgcctgtgtccgcacgcgaggtgtcgctgtattcagggattacccttgcggaatactaccgtgatatgggtatgcatgtggccatcatggctgattctaccagccgctgggcggaggcgctgcgtgaattgtctgggcgcatggaagaaatgcctgcggaggagggattccctgcgtaccttccgacgcgtcttgcagaattttatgagcgcgcaggacgcgtggaaacctgtgtggcgcgcgagggctctgtgagcatcattggtgctgtttctcccctgggtggagatttctctgagccggtgacgcagcacacaaagcgcttcatccgttgcttttgggccttggatcgtgaacttgcacacgcgcgtcattaccctgccattgggtggatagattcatactctgaatatgcgcaggaagtaagtgcatggtggagtaagtatgacccgcgcgcaggcgcgttgcgcgccgcagccttggatttgctgagaaaggaacagcggttacagcaaattgtcaggcttgtcggtcctgatgcgctgcctggagaagatcgtctggtgctaatggtgtgtgaaatgatcaaaggtggctttctgcagcagaacgcttttgatccgacggatgtgttctcctgtcccgaaaagcaggtgcagatcttgcgtaccatagtggattttcacgaacgtgccgtggtgctgctgcgtgcaggtatttcgctttctgcgctgtcccagctttcgtgccgggagctcatcgtacgtatgaaaactacgtacgggaatgaggatgtacacaagatgcagaaagtgtacgacacgatgtgcactgagtttgaccaactgagtgtgtgtgctgccgcgcgcacacaagggggggagaaagtcgaatga

SEQ ID NO: 711 - DNA, 1779 bp, Chlamydia trachomatis strain MoPn
cagggctatgtcgtagaagcttacggaaatttattgcgggtgcattttgatgggcatgtgcgtcaaggagaagtggcctatgtcagcgtggatgatacttggttgaaagcggaaattatagaagttgtgggagatgaggttaaagtccaagtttttgaggaaactcaaggaatttctcgaggcgctttggtaactttttccgggcatttattagaagcggaacttgggcccggtctattgcaaggtatttttgacggacttcagaatcgcttagaggtattggcagatacaagcttgttcttgaaaagaggggagtatgttaatgccatttgtcgggaaactgtatgggcttatacgcaaaaggcttctgtcggggatgttctatctcggggagatgtgcttggtacagtaaaggaagggcggtttgatcataaaatcatggttcctttctcttgttttgaggaagtgactatcacttgggtcatttcttcaggagattacactgttgataccgttattgctaaaggacgtactgcttcaggagccgagcttgaatttacaatggttcagaaatggcccattaaacaggcttttttagaaggggaaaaggtaccgtctcatgaaattatggatgttgggttacgagtattagatactcagatccccgtcttaaagggaggaactttttgtactccagggccttttggtgcaggaaagaccgttttacagcaccatttatctaagtatgcagctgtagatatcgtagttttgtgtgcttgtggagagcgagctggagaggttgtagaaattcttcaggagttcccgcatttgacagatcctcatacggggcagtctttgatgcataggacctgtattatttgtaatacatcttccatgcctgtagcagctagagagtcctccatttatttgggtattactatagcagaatattaccgtcaaatggggttgcatgttttgttattggctgactcgacatctagatgggctcaagctttaagggaaatttcagggcgattagaagaaatccctggagaagaagctttcccagcctatttggcgtctcgaatagcagctttttatgagcgaggcggggctgtgaaaatgaaagatggatcggaaggctccttgactatctgtggagcggtttctcccgcaggaggaaattttgaagagcctgttacacaagcaactttatctgttgttggggctttctgtgggctttctaaggctagagcagatgctagacggtatccttctattgatccgatgatttcatggtctaagtacttggattctgtggcggagattttagagaaaaaagttccaggatggggagattccgttaaaaaagcttctcgtttcttagaagaaggagcagaaattggtaagcgaatagaagttgttggggaagaagggatttctatggaagatatagaaatctttttgaaatcagagttgtatgatttctgttacttacagcaaaacgctttcgatgcagaggactgttattgtccttttgatcgtcaaatagagcttttttctttaatgagtcatatttttagctctagattctgttttgattgtccagataatgctcggagtttctttttagagcttcaaagtaaaattaaaacgctgaatggtcaaaaattcctttctgaagactatcagaaggggctagaagtgatctataaactattagaaagcaaaatggtgcagacggcgtaggtatgcaaacaatatatacaagaattacgg

SEQ ID NO: 712 - DNA, 965 bp, Enterococcus faecalis strain V583
gtgcaaattggaaaaattgtcaaagtttcaggtcctttgattttagctgaaaacatgtcagatgctagtatccaagacatttgtcatgtaggagatttaggcgttatcggagagattattgaaatgcgaggcgacgtcgcttcgattcaagtatatgaagaaacaacaggcattggaccaggagaaccagttatttcaacaggagaaccattatctgttgaattagccccaggtttaattgccgaaatgtttgatggtattcaacgaccattggatacatttcaagaagtaacccacagtaactttttaggccgtggcgttaaaattgatgcgttagatcgtgagaaaaaatggacgtttgaaccaactgtggcagttggtgaagaagtgtcggcaggtgacatcgtcggtgtggttcaagaaacaccgattattcaacataaaattatggtgcctttcggcgtttcaggaacgattgccgaaattaaagcaggtgactttgccattgatgaaacagtttactcagtggaaacggctaaaggaacggaaagttttagcatgatgcaaaaatggcccgttcggcggggacgtcccattttagaaaaactaagtcccaaagtaccgatggtgaccggacaacgcgtaattgatacctttttcccaattacgaaaggcggagcggcagcagttccaggaccatttggcgctggaaaaacagtcgttcagcaccaaattgctaagtgggccgatgtcgacttagtcgtttacgttggttgtggggaacgcgggaatgaaatgacagatgttttaaatgaatttccagaattaattgacccaacaactggtgagtctttgatgaatcggacgattttaattgcgaatacgtcaaatatgccggtagcggcacgggaagcctcgatttatacagggattaccattgcagaatatttccgtgatatgggtta

SEQ ID NO: 713 - DNA, 1737 bp, Methanosarcina barkeri
gtggaagtaaaaggtgaaatttatcgtgtgtctgggcctgtcgtcaccgccatcggcttgcaggcaaaaatgtatgacctggtcaaagtcggtaatgaaggtttaatgggtgaagtcattcagatattagggcccaagaccatcatccaggtatatgaagagaccgcaggtatcaagccaggggaaccctgtgtatctacagggtcgtctctgtccgtagaacttggtccgggtcttctttccagtatttatgacggggttcaaaggcctctgcacgtcctgcttgaaaaaatgggtagcttcatccagagaggtgtcagcgcagatgggcttgatcataagaaactctgggatttcaaacccattgtcaagaagggcgattccgtaaaaggtggagacgtaattggtgttgtacaggaaaccgtgaatattgaacataagatcatggtgcctcctgatatctcaggtacaatttccgacataaagagcggaaactttacggtagtagacacaatctgtactctgactgatgggaccgaattgcagatgatgcagaggtggcctgttcgaagacccagacctgtgaaggcaaaacttactccaaccaggcctctggttacaggaatgagaatccttgatgggcttttccctgtggcaaaaggcggaacagctgcaatccccggacctttcggatcgggaaagaccgtaactcagcagtcgcttgcaaaatggagtgataccgaaattgtggtctacatcggttgtggtgagcgtggaaacgaaatggcagatgttctgagcgaattccctgaactcgaagatccgcagaccgggcgcccacttatggagcgtactgttcttatcgctaacacttcaaacatgcctgtggccgcaagagaagcatctgtgtataccggaatcaccattgcagaatactaccgtgacatgggattagatgtatcccttatggcagactccacctcaaggtgggcagaagccatgagagaaatctcttcccgtctggaagaaatgcctggtgaagaaggttacccagcatacctgtctgcaagactggccgaattctacgagcgtgccggggttgcggagagtctttgcggcgaaacaggttccattactgttattggagcagtatctccacctggcggtgacttctcagagcctgttacacagaataccctgcgtatcgtaaaagtgttctgggctctcgatgccaaactatctcagaggcgtcacttcccggccatcaactggctgaacagttacagtctgtataaggacagtcttaatgactggtttgcagataatgtggctcctgattatgtgcctttgagggaaagagcaatggaaatgctccagacagaatctgaactgcaggaaatcgtgcagcttgtaggttccgatgctctgccagacgaccagcagcttctgcttgaaatcacccgtatgcttagggaaattttcctgcagcagaatgcattccacccagtagatgcatacagcccgttcgatcagcagtacaagatccttaaggcaatcatgaaatggggagacgctgcgatggatgccttgaaatcaggtgttcccgtaactgaaattatcaagcttgaatccaaaaatgtgcttgctaaggtcaagtacgaagagaagtttgatgagtctatgaatgctgtcctggcacagatggataaagagtttgcatccctgagaggtaggtaa

SEQ ID NO: 714 - DNA, 1785 bp, Methanosarcina jannaschii
atgaaaagagaggttgagaatatgccagttgttggtaagattattaaaatcgcagggcctgttgtagttgcagagggaatgaaaggagctcagatgtatgaggtcgttaaagtaggagaagagaaattgactggagaaatcattcagttgcacgatgataaagcagttattcaggtttatgaagaaacatctggaattaaaccaggagagccagttgttggtactggagctccattgtctgttgaattagggccagggatgttaagagctatgtatgatggtattcagaggcctttaacagcaattgaagagaaaacaggttcaatctttatcccaagaggagttgatgtccctgcattaccaagagatataaaatgggaatttaaaccagtggtaaatgaaggagattatgttgaagaaggagacataattggaactgttgatgaaactccttcaatagttcataaaatcttagttccaattggtgttaaaggaaaaattgttgaaataaaagagggtaaatttacagttgaagagacagttgcagttgtagaaacagaaaatggagaaaggaaagaaattacaatgatgcaaaaatggccagtaagaaaaccaagaccatataaagagaaactacctccagaaattccattaattacagggcaaagagttgaagacactttctttacattagcaaaaggaggaacagcagcaattccaggtccattcggttcaggaaaaacggttactcagcatcagttggcaaagtggtctgacgctgatgtcgttgtttatatcggatgtggagaaagaggaaacgagatgacagaggttattgaagagttcccacacttagaagatattagaactggaaacaaattaatggatagaactgtattaatagccaacacatcaaacatgcctgtcgctgcaagggaagcatctgtctatacaggaattacaattgcagagtacttcagagatatgggttatggagttttattaacagcagattcaacatcaagatgggcagaggcaatgagagaaatttcaggtagattggaagaaatgccaggggaagaagggtatccagcatacttagcttcaagattggctcagttctatgaaagagctggaagagttataaccttagggaaagataacagacaaggattcgtttgtatcgttggagctgtttcaccaccaggaggggacttctcagaaccagttacatcaaacacactaaggatagttaaggtattctgggcgttagatgcaaacttggcaagaagaagacacttcccagctatcaactggttgcagagttattcattatacattgatgatgttacagagtggtggaacacaaatactggtccagattggagacaattaagagatgaagcaatgagcttattacaaaaagaggcagagttgcaagagattgttcagttagttgggcctgatgcattgccagatagggagagagttattttagaagttgcaagaatgttgagggaggatttcttacagcaagatgcgtttgatgaggtagatacctactgtcctccaatgaaacagtacttaatgttaaagataattatgacattctaccaagaagcattgaaggcagttgaaagaggagttgaaccagctaagattttaggagtttcagttaagcaagatattgcaagaatgaaatacatcccacacgatgagtttataaatgttaaatcaaaagaaataatggagaaaattaagaatgaattaggttcattaaactaa

SEQ ID NO: 715 - DNA, 1354 bp, Porphyromonas gingivalis strain W83
tgagcgaggtgatcaaggtgatcggcaaaaatgcttatgtgcaggttttcgaaagtactcgcggtatgcacgtaggagatgaggcagagtttaccggcagtatgcttgaggtaacgctcggccccggtatgctttcgaagaactacgacggtctgcaacacgacttggacaagatggacgggatcttcctcaaacgaggcgattatactcccgctctcgatgacgacaagctgtgggacttcaagcctttggccaatgtgaacgacaatgtgatcgcaggctcatggctcggagaggtgacggaaaatttccaaccgcacaagatcatggtacctttcgttttcgaaggcaattacaaggtgaagagtctggccaaagccggttcgtacaaagtgaacgatgtgatcgctgtggtaacggatcaggacgggaaagaccacaatgtaaccatggtgcagaaatggccggtgaaacgtgctatcacttgctatcgcgagaagccgcgtcctttcaaactgctcgaaacgggtatccgtatcatcgacactttcaaccccatcgtagagggtggtacgggatttatccccggtcctttcggtacgggaaagacggtgctccagcatgctatctcgaagcaggcggaagccgatatcgtgatcattgcagcctgtggcgagcgtgcaaacgaggttgtggagatctttgcggaattcccccacctgaatgacccccacacgggacgtaaattgatggaacgtaccattattattgctaatacgtcgaatatgcctgtggcttcgcgtgaggcatccgtatatacggccatgacgatagccgagtactatcgctccatgggccttcgcgtgctgatgatggcagactccacttcgcgttgggcacaggctctgcgtgagatgtctaaccgtctggaagagcttcccggaccggatgctttcccgatggacttgtcagctatcgtagccaacttctacgctcgtgcaggatacgtttacctgaacaacggttcggccggttcggtaacgttcatcggtacggtatctcccgccggtggtaacctcaaagagcctgtgacggaaaacaccaagaaagtggctcgctgcttctatgctttggagcagaatcgtgccgaccgcaaacgttatccggctgtaaaccccatcgatagttactcgaagtacatcgaatatcccgaattcgagagctatatatcgaaccacatcagtttactcattatattcaacagaagttggcagatatatggatcaaatcttacagcagactggactactaaggtgaatgagctgaagatgcgcttgcatcagggtaaagaaat

SEQ ID NO: 716 - DNA, 1788 bp, Streptococcus pneumoniae strain Type 4
tttgactcaagggaagattataaaagtatcgggacctctagttattgcatcaggtatgcaggaggctaatattcaagatatttgccgtgtaggtaagctagggttaatcggtgaaattattgaaatgagaagagatcaggcatctatccaagtctatgaagaaacatctggtcttggtccgggagaacctgttgttacaactggagaacctctctcggttgaattagggccaggattgatttctcaaatgtttgatggcatacaacgcccattagatcgatttaaattggctactcataatgattttctagttcgtggggtagaagttccaagtttggatagagatattaagtggcattttgattccactatagcaattggtcaaaaagtgagtacgggtgatattcttggaactgtcaaggaaaccgaggtagttaatcataaaattatggttccttatggagtatctggagaagtcgtttctattgcatctggcgattttacaattgatgaagttgtatatgaaataaaaaaattggacggtagtttctataaaggaacgcttatgcaaaaatggcctgtccgcaaggcgcgtcctgtttctaaacgtttaattccagaagaaccattaatcacaggtcaacgagttattgatgcattctttccagtaaccaaagggggagctgcagcagttcctggaccgtttggagcaggaaagacagttgtacaacaccaagtagctaaatttgccaatgttgatattgttatttatgtcggttgtggagaacgtggaaatgaaatgacggatgtactgaatgagtttcctgagttgattgaccctaataccggacaatcaattatgcaacggacagttctgattgctaatacttcaaatatgcctgttgctgctcgtgaggcttcaatttatacaggaattaccatggctgagtattttcgtgatatgggctactctgtcgccattatggctgattcaacttcacgttgggcagaagcgctacgtgaaatgtcaggacgtctagaagaaatgcctggtgatgagggttatcctgcttatctgggaagtcgtatcgctgaatattatgaaagagcaggacgttctcaggttctagggcttccagaacgtgaaggaacgattactgctattggagctgtatcgccacctggtggagatatttcagaaccagttactcaaaacactttacggattgtgaaagttttttgggggcttgatgctccgttggcacagcgacgtcattttcctgcaattaactggcttacatcttattcactatataaagacagtgtgggcacttatatagatggtaaagagaagacagattggaatagtaaaataactcgtgcgatgaactacttacaacgggaatctagtttagaggaaattgttcgtcttgttggaattgattctctgtctgataatgaacgactaacgatggaaattgctaaacaaattcgagaagattatttgcaacagaacgcttttgattcggtagatacattcacttcgtttgcaaaacaagaagcaatgctaagtaatattctcacttttgctgatcaggcaaatcatgctttagagttgggttcttactttacagagattatggaaggtaccgtggcagttcgagaccgtatggcgagaagtaaatatgtttcagaagatagattagatgaaatcaaaattatatcaaatgagattacacatcaaattcatttgatattagaaacaggaggtctataaatgagtgttat

SEQ ID NO: 717 - DNA, 823 bp, Burkholderia mallei strain GB8
cgatcctggtgtgctcggccgctgacggcccgatgccgcaaacgcgtgagcacatcctgctggcgcgtcaggtcggtgtgccgtacatcatcgtgttcctgaacaagtgcgacatggtggacgacgcggagctgctcgagctggtcgaaatggaagtgcgcgaactgctgtcgaagtacgacttcccgggcgacgacacgccgatcatcaagggttcggcgaagctggcgctggaaggcgacaagggcgagctgggcgaagtggcgatcatgaacctggccgacgcgctggacacgtacatcccgacgccggagcgtgcggtcgacggcgcgttcctgatgccggtggaagacgtgttctcgatctcgggccgtggtacggtggtgacgggtcgtgtcgagcgcggcgtgatcaaggttggcgaggaaatcgaaatcgtcggtatcaaggcgacggcgaagacgacctgcacgggcgtggaaatgttccgcaagctgctggaccagggtcaggcgggcgacaacgtcggtatcctgctgcgcggcacaaagcgtgaagacgtggagcgcggccaggttctggcgaagccgggttcgatcacgccgcacacgcacttcacggcagaagtgtacgtgctgagcaaggacgaaggcggccgccacacgccgttcttcaacaactaccgtccgcagttctacttccgtacgacggacgtgacgggctcgatcgagctgccgaaggacaaggaaatggtgatgccgggcgacaacgtgtcgatcacggtgaagctgatcgcgccgatcgcgatggaagaaggtctgcg

SEQ ID NO: 718 - DNA, 824 bp, Burkholderia pseudomallei strain 1026B
gcgatcctggtgtgctcggccgctgacggcccgatgccgcaaacgcgtgagcacatcctgctggcgcgtcaggtcggtgtgccgtacatcatcgtgttcctgaacaagtgcgacatggtggacgacgcggagctgctcgagctggtcgaaatggaagtgcgcgaactgctgtcgaagtacgacttcccgggcgacgacacgccgatcatcaagggttcggcgaagctggcgctggaaggcgacaagggcgagctgggcgaagtggcgatcatgaacctggccgacgcgctggacacgtacatcccgacgccggagcgtgcggtcgatggcgcgttcctgatgccggtggaagacgtgttctcgatctcgggccgtggtacggtggtgacgggtcgtgtcgagcgcggcgtgatcaaggttggcgaggaaatcgaaatcgtcggtatcaaggcgacggcgaagacgacctgcacgggcgtggaaatgttccgcaagctgctggatcagggtcaggcgggcgacaacgtcggtatcctgctgcgcggcacgaagcgtgaagacgtggagcgcggccaggttctggcgaagccgggttcgatcacgccgcacacgcacttcacggctgaagtgtacgtgctgagcaaggacgaaggcggccgccacacgccgttcttcaacaactaccgtccgcagttctacttccgtacgacggacgtgacgggctcgatcgagctgccgaaggacaaggaaatggtgatgccgggcgacaacgtgtcgatcacggtgaagctgatcgcgccgatcgcgatggaagaaggtctgcg

SEQ ID NO: 719 - DNA, 800 bp, Clostridium beijerincki ATCC 8260
tgtatcagcagcagatggtccaatgccacaaacaagagaacatatactactaggatcaagagttggtatccaatatatcgtagtattcttaaataaagcagatatggtagacgatccagaattattagaattagtagaaatggaagtaagagaattattaagcgaatatgacttcccaggagacgatattccagtaataacaggatcagcattaaaagcattagaaaatccaacagatgaagaagcaattaagccaatcatggatttaatggaagcagtagatagctatatcccaactccagaaagagcaacagataagccattcttaatgccaatcgaagatgtattcacaattacaggaagaggaacagttgcaacaggaagagttgaagctggagtacttcatgtaggagatgaagtagaaatcgttggattaacagaagaaaagaagaaagttgtagtaactggaatcgaaatgttcagaaagttattggatgaagcacaagctggagataacatcggagcattattaagaggagttcaaagaactgatattgaaagaggtcaagttttatcaaaaccaaattcagtacaccctcacactaaatttgtaggtcaagtatacgtacttaaaaaagaagaaggtggaagacatactccattctttgatggatacagaccacaattctatttcagaacaacagacgttacaggrtcaatcaagttaccagatggaatggaaatggtaatgcctggagatcacattgatatgaatgttgaattaatcactccaatcgcaa

SEQ ID NO: 720 - DNA, 799 bp, Clostridium innocuum ATCC 14501
ggtgctatcctggttgttgctgcatctgatggtcctatgcctcagactcgtgagcacatcctgcttgctcgtcaggtaggtgttccttacatcgttgtattcctgaacaaatgcgacatggttgatgacgaagaactgatcgaccttgttgaaatggaagtacgtgagctgttaagcgagtacggattcgacggagataacgctccggttatccgtggttctgcactgaaggctctggaaggtgacgacaaatacgttggcgctatcaaagaactgatggatgcagttgatgaattcatcccagatccaactcgtgaaactgacaaaccattcctgatgtctgtagaagacgttatgacaatcacaggacgtggtacagttgctacaggacgtgttgagcgtggggtagtaaaactgggagaagaagttgaaatcgttggtatcaaggatactcagaaaactgttgttaccggactggaaatgttccgtaagcagctggacttcgcagaatccggagacaacatcggtgctctgctgcgtggtatcaaccgtgaccagattcagcgtggacaggttcttgctaaaccaggatccgtacatccacacacaaagttcaaggctcaggtttatgtattaacaaaagaagaaggtggacgtcacactccattcgtttctaactaccgtcctcagttctacttccgtacaactgacgtaactggtgttattacattaccggaaggaactgaaatggttatgcctggtgacaacgttgaaatgaacgttgagctgattgctccaa

SEQ ID NO: 721 - DNA, 789 bp, Clostridium novyi ATCC 19402
ttgtatcagcagcagatggtccaatgccacaaacaagagaacacatcctattagcatcaagagtaggagttaaccacatagtagtattcttaaacaaagcagaccaagtagatgatccagaattactagaattagtagaaatggaagtaagagaattattaagcgaatacggatttgacggagacgaatgtccagtagtagtaggatcagcattaaaagcaatcgaagaaggggatgaccaatgcatcctagacttaatgaaagctgtagatgaatatatcccaactccagaaagagcaacagatcaaccattcttaatgcctgtagaagatgtatttacaattacaggaagaggaacagttgcaacaggaagagttgaaagaggagtactacacgtaggagatgaagtacaaatcgtaggaatgaaagaagaaatcggaaagacaacaatcacaggagtagaaatgttcagaaagatgttagatgaagcaatggctggagataacatcggagcattattaagaggagtacaaagagacgaaatcgaaagaggtcaagtactagcaaaaccaggttcagtaacacctcacaaaaaattcgtaggtcaagtttacgtattaaagaaagaagaaggtggaagacacactccattctttaacggatacagaccacaattctacttcagaacaacagacgtaacaggatcaatcgctttaccagaaggagtagaaatggtaatgccaggagaccatatagacatgaacgtagaattaatcacaccagtagcaa

SEQ ID NO: 722 - DNA, 798 bp, Clostridium septicum ATCC 12464
gttcagcagcagacggtccaatgccacaaacaagagaacatatactactagcatcaagagttggtgttgactatatcgtagtattcttaaacaaggcagatatggtagatgacgaagaattattagaattagtagaaatggaagttagagaattattatcagaatacaacttcccaggagatgatattccagtaatcaagggatcagctttagtagcattagaaaacccaacagatgaaaaatcaatcgctccaatcttagaattaatggaagcagtagatagctacattccaacaccagaaagagcaacagataagccattcttaatgccagtagaagatgtattcacaataactggtagaggaacagttgcaacaggaagagttgaaagaggagttcttcatgtaggagacgaagtagaaatcgttggattatcagaagaaagcagaaaagtagtagtaacaggaatagaaatgttcagaaagttactagacgaagcacaagctggagataatgttggagtacttttaagaggtgttcaaagaacagatatcgaaagaggtcaagtattagcaaagactggatcagttaagccacacagcaagttcgtaggtcaagtatacgtacttaagaaagaagaaggtggaagacatactccattcttcgatggatacagaccacaattctacttcagaacaacagacgttactggatcaatcaaattaccagacggaatggaaatggttatgccaggagaccacattgatatgaacgttgaattaatcactcaagtagcaa

SEQ ID NO: 723 - DNA, 799 bp, Clostridium tertium ATCC 14573
gttcagcagcagatggtccaatgcctcaaacaagagaacacatactactagcttcaagagttggtgttgactacatagttgttttcttaaacaaggcagatatggtagatgacgaagaattattagaattagttgaaatggaagtaagagaattattatcagaatacaacttcccaggagatgatattccagtaataaagggttcagctttacaagcattagaaaacccaacagatgaaaaagcaatcgctccaatccttgagttaatggaagctgtagatagctacattccaactccagaaagagcaacagataagccattcttaatgccagtagaagatgtattcacaatcactggtagaggaacagttgctacaggaagagttgaaagaggagttcttcacgtaggagacgaagtagaaatcgttggattatcagaagacagcagaaaagtagtagtaacaggaatagaaatgttcagaaagttactagacgaagcgcaagctggagacaacgtaggagttcttttaagaggagttcaaagaactgacatcgaaagaggtcaagttttagcaaaagttggatcagttaagccacacaagaaatttgtaggtcaagtatacgtacttaaaaaagaagaaggtggaagacatactccattcttcgatggatacagaccacaattctacttcagaacaacagaygttactggttcaatcaagttaccagatggaatggaaatggttatgccaggagaccacattgatatgaacgttgaattaatcactcaagtagctat

SEQ ID NO: 724 - DNA, 801 bp, Clostridium tetani ATCC 19406
tagtaagtgcagcagatggtccaatgccacaaacaagagaacacatactattagcatccagagttggagttgagcacatagtagtattcttaaataaagcagaccaagtagatgacgcagagttaatcgaattagtagaaatggaagtaagggaattaatgaacgaatacggattcccaggagatgacgcaccagtagtagtaggatccgcattaaaagcattagaaaatccagaagatgatgcagcaacacaatgcataatggacttaatggcagcagtagatgaatatataccaacaccagaaagagcaacagataagccattcttaatgccagtagaagatatcttcacaatcacaggaagaggaacagttgcaacaggaagagtagaaagaggaattctaaaagtaggagacgaaatagaaatcgtaggattaagtgatgaaagcaagaaatcagtaatcacaggaatagaaatgttcagaaaactattagatgaagcacaagcaggagataacatcggagcattattaagaggtgttcaaagagatgaaatccaaagaggtcaagtattagcagcaacaggatcagtaaaaccacataagagttttacaggtcaagtatatgtattaaagaaagaagaaggaggaagacacactccattctttaacggatacagaccacaattctactttagaacaacagacgtaacaggttcaatcgcactaccagaaggagtagaaatggtaatgccaggagaccacatagacatgaaggtagaattaataacaagagtagcaa

SEQ ID NO: 725 - DNA, 633 bp, Enterococcus malodoratus ATCC 43197
tatgcctcaaactcgtgaacacatcttgttatctcgtaacgttggtgttccttacatcgttgtattcttaaacaaaatggatatggttgatgatgaagaattactagaattagttgaaatggaagttcgtgacttattgtcagaatacgacttcccaggcgacgacactccagttatcgctggttcagctttgaaagctttagaaggcgatgcttcatacgaagaaaaaatcttagaattaatggctgctgttgatgaatatatcccaacaccagttcgtgatactgacaaaccattcatgatgccagtcgaagatgtattctcaatcactggtcgtggaactgttgcaactggtcgtgttgaacgtggacaagttcgcgttggtgacgaagttgaaatcgttggtattgctgaagcaactgctaaaacaactgttacaggtgttgaaatgttccgtaaattgttagattacgctgaagcaggcgataacattggtgcattgttacgtggtgttgcacgtgaagacatccaacgtggacaagtattggctaaaccagcttcaatcactccacatacaaaattctctgcagaagtttacgttttaactaaagaagaaggcggacgtcatactcc

SEQ ID NO: 726 - DNA, 623 bp, Enterococcus sulfureus ATCC 49903
cacgtgaacacatcttgttatctcgtaacgtaggtgttccttacatcgttgtattcttaaacaaaatggatatggttgatgacgaagaattattagaattagtagaaatggaagttcgtgacttattatcagaatacgatttcccaggcgatgacactccagttgttgcaggttctgctttgaaagctttagaaggcgacgcttcttacgaagaaaaaatcatggaattaatggctgcagttgacgagtacatcccaactccaactcgtgacactgacaaaccattcatgatgccagttgaggatgtattctcaatcactggacgtggtactgttgctacaggtcgtgttgaacgtggacaagttcgcgttggtgacgttgtagatatcgttggtatcgctgacgaaactgctcaaacaactgtaacaggtgttgaaatgttccgtaaattattagactacgctgaagcaggcgataacatcggtgctttattacgtggtgttgctcgtgaagacatccaacgtggacaagttttagctaaaccagcttcaatcactccacatacaaaattctctgctgaagtatacgtattaagcaaagaagaaggtggacgtcatactcca

SEQ ID NO: 727 - DNA, 646 bp, Lactococcus garvieae ATCC 49156
cggtcctatgcctcaaactcgtgaacacatcttgttatcacgtaacgttggcgtaccatacatcgttgttttcttgaacaaaatggatatggttgatgacgaagaattgctagaattagttgaaatggaagttcgtgacctattgtctgaatatgacttcccaggcgacgatgttcctgtaatcgctggttctgctttgaaagctcttgaaggagatccttcatacgaagaaaaaatcatggaattgatggctgcagttgacgaatacgttccaactccagaacgtgatactgacaaaccattcatgatgccagtcgaagacgtattctcaatcactggacgtggtactgttgctacaggccgtgttgaacgtggacaagttcgcgttggtgatgaagtagaaatcgttggtattgctgacgaaactgctaaaacaactgtaacaggtgttgaaatgttccgtaaattgttagactatgctgaagcaggggataacattggtgcattgctacgtggggttgctcgtgaagacatccaacgtggacaagtattggctaaagctggtacaatcacacctcatacaaaattcaaagctgaagtttatgttttgacaaaagaagaaggtggacgtcacactccattcttc

SEQ ID NO: 728 - DNA, 823 bp, Mycoplasma pirum ATCC 25960D
gagcaattttagttgtttctgcaactgatggtccaatgcctcaaactcgtgaacatatcttattagcacgccaagttggtgttcctaaaatggttgttttcttaaacaaatgtgatgttgcttctgatccagaaatgcaagaattagttgctgaagaagtaaaagacttattaaaatcttatggttttgatggtgacaatactccaattattcgtggttcagcattagaagcattaaatggtaaacctgaatgagaagaaaaaattaaagaattaatgaaggcagtggatgacactattcctgatccagttcgtgatactgaaaagccattcttgttaccaattgaagacgtaatgacaattacaggtcgtggtactgttgttacaggtcgtgtagaacgtggtactctaaaattaaatgatgaagttgaaattgttggtttaggtgaaacatttaaatctgttgtaacaggtattgaaatgttccgtaaagaattagatgaagctcgtgctggtgacaatgctggtattttacttcgtggtgttgaccgtggtcaagtacaacgtggtcaagttcttgctaaaccaggttctattactcctcatactaaatttaaagctgaaatttatgctttgaaaaaagaagaaggtggtcgtcatactgctttcttaaacggttatcgtcctcaattctatttcagaacaactgatgttacaggttctattaaattaaaagatggaactgaaatggttatgcctggtgacaatactgaaatcactgtagaattaatttcaccaattgcttgtaaaaaggaagtaagttt

SEQ ID NO: 729 - DNA, 826 bp, Mycoplasma salivarium ATCC 23064
ggagcaatcttagttgttgctgcaactgatggtgcgatgcctcaaactcgtgaacacgttttacttgcaaaacaagttggtgttcctaaaatcgttgttttcttaaacaaaatcgatatgttcaagccagaagaaagagccgaaatggttgaaatggttgaaatggacattcgtgacttattaaacaaatacgactttgatggtgacaatactcctattattgctggttcagcattaaaagcattacaaggtgatccagaatatgaaaagaatattctagaacttatggatgcagtagacacatacattgatgaacctactcgtgataaagataaaccattcttaatggctgtagaagacgtatttacaattactggtcgtggaactgttgctactggtagagtagaacgtggtacattacatctaaatgatgaagttgaaatcgttggtctacgtccaacaattaaaactgttgttactggaattgaaatgttccgtaaaaatttaaaagaagctcaagctggagataatgcaggacttttactacgtggaattgatagagatcaagtagaacgtggacaagttttggccaaaccaaaaagtattattcctcacacagaatttgaagctgctgtgtatgttctaaaagctgaagaaggtggacgtcacactccattctttgaacactataaaccacaattttactttcgtacaaccgacgttactggtggaattaaattcaaacctggacgtgaaatggttatgcctggcgaaaatgttgaatttacagttactttaattgctcctattgcagttgaagaaggaa

SEQ ID NO: 730 - DNA, 810 bp, Neisseria polysaccharea ATCC 43768
tggtatgttccgcagcygayggycctatgcctcaaactcgcgaacacatcctgytggctcgccaagtaggygtaccttacatcatcgtrttcatgaacaaatgcgacatggttgacgatgccgagctgttggaactggttgaaatggaaatccgygacctgytgtcmagctacgacttcccmggcgacgactgcccaatcgtacaaggttctgcactgaaagctttggaaggygaygctggttacgaagagaaaatcttcgaaytggctgctgctttggacagctacatcccaactcctgagcgtgctgtggacaaacckttcytgytgcctatcgaagacgtrttctctatctctggycgyggtacmgtagtaacyggycgtgtagagcgcggtrtcatccacgttggtgacgagatygaaatcgtaggtctgaaagaaacccaaaaaaccacttgtaccggcgttgaaatgttccgcaaactgctggacgaaggtcaagcwggtgacaacgtaggcgtattgytgcgtggtaccaarcgtgaagacgtagagcgtggtcaagtattggcyaaaccaggyaccatyactccscacaccaaattcaaagcagaagtatacgtactgagcaaagaagagggtggtcgycacactccattcttcgcyaactaccgyccmcaattctacttccgtacyactgacgtaacyggtgcagttactttggaagaaggtgtagaaatggtaatgccaggtgagaacgtaaccattacygtagaactgattgcgcctatcgctaggaagaaggtctgcg

SEQ ID NO: 731 - DNA, 813 bp, Salmonella choleraesuis subsp. choleraesuis ATCC 13076
ctggttgttgctgcgactgacggcccgatgccgcagacccgtgagcacatcctgctgggtcgtcaggtaggcgttccgtacatcatcgtgttcctgaacaaatgcgacatggttgatgacgaagagctgctggaactggttgaaatggaagttcgygaactgctgtctcagtacgacttcccgggcgacgacactccgatcgttcgtggttctgctctgaaagcgctggaaggcgacgcagagtgggaagcgaaaatcatcgaactggctggcttcctggattcttacatcccggaaccagagcgtgcgattgacaagccgttcctgctgccgatcgaagacgtattctccatctccggtcgtggtaccgttgttaccggtcgtgtagaacgcggtatcatcaaagtgggcgaagaagttgaaatcgttggtatcaaagagactcagaagtctacctgtactggcgttgaaatgttccgcaaactgctggacgaaggccgtgccggtgagaacgtaggtgttctgctgcgtggtatcaaacgtgaagaaatcgaacgtggtcaggtactggctaagccgggcaccatcaagccgcacaccaagttcgaatctgaagtgtacattctgtccaaagatgaaggcggccgtcacactccgttcttcaaaggctaccgtccgcagttctacttccgtactactgacgtgactggcaccatcgaactgccggaaggcgtagagatggtaatgccgggcgacaacatcaaaatggttgttaccctgatccacccgatcgcaatggacgacggtctgcgt

SEQ ID NO: 732 - DNA, 812 bp, Salmonella choleraesuis subsp. choleraesuis ATCC 9184
ctggttgttgctgcgactgacggcccgatgccgcagacccgtgagcacatcctgctgggtcgtcaggtaggcgttccgtacatcatcgtgttcctgaacaaatgcgacatggttgatgacgaagagctgctggaactggttgaaatggaagttcgygaactgctgtctcagtacgacttcccgggcgacgacactccgatcgttcgtggttctgctctgaaagcgctggaaggcgacgcagagtgggaagcgaaaatcatcgaactggctggcttcctggattcttacatcccggaaccagagcgtgcgattgacaagccgttcctgctgccgatcgaagacgtattctccatctccggtcgtggtaccgttgttaccggtcgtgtagaacgcggtatcatcaaagtgggcgaagaagttgaaatcgttggtatcaaagagactcagaagtctacctgtactggcgttgaaatgttccgcaaactgctggacgaaggccgtgccggtgagaacgtaggtgttctgctgcgtggtatcaaacgtgaagaaatcgaacgtggtcaggtactggctaagccgggcaccatcaagccgcacaccaagttcgaatctgaagtgtacattctgtccaaagatgaaggcggccgtcacactccgttcttcaaaggctaccgtccgcagttctacttccgtactactgacgtgactggcaccatcgaactgccggaaggcgtagagatggtaatgccgggcgacaacatcaaaatggttgttaccctgatccacccgatcgcaatggacgacggtctgcg

SEQ ID NO: 733 - DNA, 814 bp, Salmonella choleraesuis subsp. choleraesuis ATCC 8759
tggttgttgctgcgactgacggyccgatgccgcagacccgtgagcacatcctgctgggtcgtcaggtaggcgttccgtacatcatcgtgttcctgaacaaatgcgacatggttgatgacgaagagctgctggaactggttgaaatggaagttcgygaactgctgtctcagtacgacttcccgggcgacgacactccgatcgttcgtggttctgctctgaaagcgctggaaggcgacgcagagtgggaagcgaaaatcatcgaactggctggcttcctggattcttacattccggaaccagagcgtgcgattgacaagccgttcctgctgccgatcgaagacgtattctccatctctggtcgtggtaccgttgttaccggtcgtgtagaacgcggtatcatcaaagtgggcgaagaagttgaaatcgttggtatcaaagagactcagaagtctacctgtactggcgttgaaatgttccgcaaactgctggacgaaggccgtgcyggtgagaacgtaggtgttctgctgcgtggtatcaaacgtgaagaaatcgaacgtggtcaggtactggctaagccgggcaccatcaagccgcacaccaagttcgaatctgaagtgtacattctgtccaaagatgaaggcggccgtcatactccgttcttcaaaggctaccgtccgcagttctacttccgtactactgacgtgactggcaccatcgaactgccggaaggcgtagagatggtaatgccgggcgacaacatcaaaatggttgttaccctgatccacccgatcgcaatggacgacggtctgcgttt

SEQ ID NO: 734 - DNA, 828 bp, Salmonella choleraesuis subsp. choleraesuis ATCC 51955
ggcgcgatcctggttgttgctgcgactgacggcccgatgccgcagacccgtgagcacatcctgctgggtcgtcaggtaggcgttccgtacatcatcgtgttcctgaacaaatgcgacatggttgatgacgaagagctgctggaactggttgaaatggaagttcgtgaacttctgtctcagtacgacttcccgggcgacgacactccgatcgttcgtggttctgctctgaaagcgctggaaggcgacgcagagtgggaagcgaaaatcatcgaactggctggcttcctggattcttacattccggaaccagagcgtgcgattgacaagccgttcctgctgccgatcgaagacgtattctccatctccggtcgtggtaccgttgttaccggtcgtgtagaacgcggtatcatcaaagtgggcgaagaagttgaaatcgttggtatcaaagagactcagaagtctacctgtactggcgttgaaatgttccgcaaactgctggacgaaggccgtgccggtgagaacgtaggtgttctgctgcgtggtatcaaacgtgaagaaatcgaacgtggtcaggtactggctaagccgggcaccatcaagccgcacaccaagttcgaatctgaagtgtacattctgtccaaagatgaaggcggccgtcatactccgttcttcaaaggctaccgtccgcagttctacttccgtactactgacgtgactggcaccatcgaactgccggaaggcgtagagatggtaatgccgggcgacaacatcaaaatggttgttaccctgatccacccgatcgcaatggacgacggtctgcgtttcgca

SEQ ID NO: 735 - DNA, 825 bp, Serratia grimesii ATCC 14460
ggcgctatcctggttgttgctgcgactgatggcccaatgccacagacccgtgagcacatcctgctgggtcgtcaggttggcgttcctttcatcatcgtattcatgaacaaatgcgacatggttgatgatgaagagctgctggaactggtagaaatggaagttcgtgaacttctgtctgcttatgacttccctggtgatgacctgccagttgttcgtggttcagcgctgaaagcactggaaggcgaagctgagtgggaagctaaaatcatcgaactggctggctacctggattcttacatcccagaaccagagcgtgctatcgacaagccgttcctgctgccaatcgaagacgtattctccatctccggycgtggtacygtagttaccggtcgtgtagagcgcggtatcgttaaagttggcgaagaagttgaaatcgttggtatcaaagacaccgttaagtctacctgtactggcgttgaaatgttccgcaaactgctggacgaaggccgtgctggtgagaacgtaggtgttctgctgcgtggtatcaagcgtgaagacatcgaacgtggtcaggtactggctaaaccaggttcaatcaagccacacaccaaattcgactcagaagtttacatcctgagcaaagaagaaggtggtcgtcacactccattcttcaaaggctaccgtccacagttctacttccgtacaactgacgtgaccggtaccatcgaactgccagaaggcgtagagatggtaatgccaggcgataacgtgaacatggttgtaaccctgattcacccaatcgcgatggacgacggtctgcgtttc

SEQ ID NO: 736 - DNA, 798 bp, Clostridium difficile ATCC 9689
tattagtttgttcagcaacagatggaccaatgccacaaacaagagagcatatactattatcaagacaagttggagtaccatatatagtagtattcttaaacaaatgtgacatggtagatgatgaagagttattagagttagtagagatggaagtaagagatttattaacagaatatgatttcccaggagatgacactccaatagtaagaggttcagcattaatggcattagaagatccaaagagygagtggggagataagatagtagaattattcgagcaaatagatgagtatataccagctccagagagagatacagataaaccattcttaatgccagtagaggacgtattctcaatcacaggaagaggaacagttgcaacaggaagagtggaaagaggagtactaaaagtacaagacgaagtagakttagtaggattaacagaagcaccaagaaaagtagtagtaacaggagtagagatgttcagaaaattattagaccaagcacaagcaggggataatataggagcattattaagaggagtacaaagaaacgagatagaaagaggacaagtactagcaaagactggatcagtaaaggcacacacaaagtttacagcagaagtatatgtacttaaaaaagaagarggtggaagacatacaccattctttgatggatatagaccacaattctatttcagaacaacagacgtaacaggagcttgtaagttaccagaaggaatagagatggtaatgcctggagataacgtaacaatggaagtagacttaataaactcaa

SEQ ID NO: 737 - DNA, 411 bp, Burkholderia pseudomallei strain 1026B
gtcaacatgatggagctcatcaacaacatcgcgaaggagcacggcggttactccgtgttcgcgggcgtgggcgagcgtacccgtgaagggaacgacttctaccacgaaatgaaggactcgaacgttctcgacaaggtcgcgctggtgtacggccagatgaacgagccgccgggcaaccgtctgcgcgtggcgctgacgggcctcacgatggccgagcacttccgtgacgaaggcctcgacgtgctgttcttcgtcgacaacatctaccgtttcacgctggccggtaccgaagtgtcggcgctgctcggccgtatgccgtcggcagtgggctatcagccgacgctggctgaagaaatgggcaagctgcaagagcgcatcacgtcgacgaagaagggctcgatcacgtcggtt

SEQ ID NO: 738 - DNA, 394 bp, Clostridium bifermentans ATCC 638
tacaagagcttattaacaatatagctactcaacacggtggtatatcagtattcgcaggtgttggagagagaacaagagaaggtaacgacttattccatgagatgagcgatacaggagttataaataaaacagctctagtattcggacaaatgaatgagccacctggagcaagaatgagagttgctttaactggtcttacaatggctgaatacttcagagatcaacaagggcaagacgttttattattcgtagataatatattccgtttcactcaagcaggatctgaggtttctgcacttcttggacgtactccatcagcagttggataccaaccaacattagcaacagagatgggtagattacaagagagaataacatctacaaataaagggtc

SEQ ID NO: 739 - DNA, 394 bp, Clostridium beijerincki ATCC 8260
ttaataaacaacatagctaaacaacatggtggtttatcagtatttactggagttggtgaaagatcaagagaaggtaatgacttatatcatgaaatgagagagtcaggagttattgataagacagcattagtatttggacaaatgaatgagccaccgggtgccagaatgagagttgcattaacaggtcttactatggcagagtattttagagataaaggtcaagatgtgttactattcatagataacatattcagatatactcaagcaggttcagaggtttcagcattacttggaagaacaccttcagcggttggatatcagccaacacttgcaactgaaatgggtgcacttcaggaaagaattacatcaacagttaatggttctattacgtcag

SEQ ID NO: 740 - DNA, 393 bp, Clostridium difficile ATCC 9689
ttataaacaatattgctaagcaacatggtggtatttctgtattttcaggagtaggagaaagaacaagagaaggtaacgacctttatggcgaaatgagtgagtctggagttataaataaaacagctctagtatttggtcaaatgaatgaaccacctggagcgagaatgagagttgctttaactggacttacaatggcagaacattttagagatgagcaaggacaagacgttttacttttcgttgataatatattccgtttcacacaagctggttcagaagtttcagcacttctaggacgtatgccatcagctgttggttatcagccaacattagctactgaaatgggtgcacttcaagagagaataacatcaactaagaaaggttcaataacat

SEQ ID NO: 741 - DNA, 398 bp, Clostridium ramosum ATCC 25582
ttgattcaagaattcattaataacattgctacagaacatggtggtttatcagtttttgctggagttggtgaacgtagccgtgaaggtaatgatttatattatgaaatgaaggaaagtggtgttttatctaaaacaacactagtatttggacagatgaatgaacccccaggagctcgtttaagagttgctttaacgggtcttactatggcagaagaattccgtgatgaacaaggtcaggatgtcttattattcatcgataatattttccgttttactcaagctggatctgaagtatctgccttacttggacgggtaccatcacaagctgggtatcagccaactttagcaaccgaaatgggtgctttacaagaacggattacatcaactaaaaaaggatc

SEQ ID NO: 742 - DNA, 380 bp, Clostridium septicum ATCC 12964
tagctaaggaacacggtggactttcagtattcacaggtgttggagaaagatcaagagaaggtaatgatttatattacgaaatgaaagaatcaggagttatagacaagacagctctagtgtttggacaaatgaatgaatctccaggagctagaatgagagtatctttaacaggattaactatggctgaatatttcagagatcaaggtcaagatgtgcttttattcatagataacatatttagatttactcaagctggatcagaagtatcggctttacttggaagaataccatcagcagttggttatcaaccaacactagcaactgaaatgggtgcacttcaagaaagaattacttcaactaaaaatggatcaataacttca

SEQ ID NO: 743 - DNA, 389 bp, Clostridium tertium ATCC 14573
ttaataaataatatagcaaaagagcatggtggtctttctgtatttacaggagttggagaaaggtcaagagaaggtaacgacttatattatgaaatgaaagagtcaggggttatagataagacagctttagtatttggacaaatgaatgaatcaccaggagcaagaatgagagtttcattaactggattaactatggctgaatattttagagatcaaggtcaagacgttcttttatttatagataatatatttagatttactcaagcgggatcagaagtttctgcgttattaggaagaattccttcagcagttggatatcaaccaactcttgcaactgaaatgggagcacttcaagaaagaataacatcaacaaagaatggatcaatcac

SEQ ID NO: 744 - DNA, 843 bp, Comamonas acidovorans ATCC 15668
ttcccccgcacgcatgcccaaggtgttcgatgccctgaagctcgacggctcggccctgacgctggaagtgcagcaactgctgggtgacggcgttgtgcgtaccatcgccctgggttcgtccgacggtctgcgtcgcggcctgatggtgtccaacaccggcaaccccatcaccgtgcccgtgggcaaggcgacgctgggtcgcatcatggacgtgctgggcaatcccatcgacgaacgtggtcccgtggatcaggcgctgacggctcccatccaccgcaaggcaccggcttatgacgagctgtcgccttcgcaggaactgctggaaaccggcatcaaggtgatcgacctgatctcgcccttcgccaagggcggcaaggtgggtctgttcggtggcgccggtgtgggcaagaccgtgaacatgatggaactcatcaacaacatcgccaagggccacggtggtctgtcggtgttcgccggtgtgggtgaacgtacccgcgaaggcaatgacttctatcacgaaatgtcggacgccggcgtggtcaaccaggagtcgctgaacgactccaaggtggccatggtctacggccagatgaacgaacccccgggcaaccgtctgcgcgtggcgctgaccggcctgaccatggccgaagccttccgtgacgaaggcaaggacgtgctgttcttcgtggacaacatctaccgctacacgctggccggtaccgaagtgtccgctctgctgggtcgcatgccttccgccgtgggctaccagcccacgctggccgaggaaatgggccgcctgcaagagcgcatcacctcgaccaaggtcggttcgatcacttccac

SEQ ID NO: 745 - DNA, 819 bp, Klebsiella pneumoniae subsp. rhinoscleromatis ATCC 13884
gccgtaccacgcgtgtacgaagcccttgaggtacagaatggtaatgaagttctggtgctggaagttcagcagcagctgggcggcggtatcgtacgtaccatcgccatgggttcttctgatggtctgcgccgcggtctggatgtaaaagacctcgagcacccgatcgaagtcccggtaggtaaagcaacgctgggtcgtatcatgaacgtactgggtcaaccggttgacatgaaaggcgacatcggcgaagaagagcgttgggctatccaccgcgcggcaccgtcctatgaagagctgtccagctctcaggaactgctggaaaccggcatcaaagttatcgacctgatgtgtccgttcgccaagggcggtaaagttggtctgttcggcggtgcgggtgtaggtaaaactgtaaacatgatggagctgatccgtaacatcgcgatcgagcactccggttactctgtgtttgcgggcgtaggtgagcgtactcgtgagggtaacgacttctaccacgaaatgaccgactccaacgttatcgataaagtatccctggtgtacggccagatgaacgagccgccgggaaaccgtctgcgcgttgcgctgaccggcctgaccatggctgagaaattccgtgacgaaggtcgtgacgtactgctgttcgtcgataacatctatcgttacaccctggccggtactgaagtatccgcgctgctgggtcgtatgccttcagcggtaggttatcagccgaccctggcggaagagatgggcgttctgcaggaacgtatcacctccaccaaaaccggttctatcacctccgta

SEQ ID NO: 746 - DNA, 824 bp, Neisseria canis ATCC 14687
gcgattctattccgcgcgtatatgatgctcttaaactagtggatagagaactgacgcttgaagtacaacaacagttgggtgatggtgtcgttcgtactattgcgatgggtagttccgacggcctcaaacgaggtttggcggtagttaacaccggtgctccaattacagtgcctgtgggcaaagcaacattaggccgtattatggacgtattaggtaatccggttgatgaagctggtccgattggctccgagcaaacccgagcaatccaccaacctgctcctaagttcgacgagctttctagcgccacagagattttggaaacaggtattaaagtaattgatttgctttgcccgtttgccaaaggcggtaaagtaggtttgtttggtggtgcgggagtgggcaaaaccgtaaatatgatggagttgattaacaacatcgcgaaagcacacagcggtttgtctgtatttgccggtgtgggtgaacggacgcgtgaaggtaatgacttttatcatgagatgaaagattccaatgtattagataaagtagccatggtttacggtcagatgaacgagcctcccggtaaccgtttgcgcgttgcgctaactggcttgtctatggccgaattcttccgtgacgagaaagatgaaaacggtaaaggccgtgatgtattgttctttgtagacaatatttaccgctataccctagccggtacagaagtatctgcattgcttggccgtatgccttcggcagtaggttatcagccgacgttggcagaggaaatgggccgcttgcaagagcgtattacytcamcccaaacaggctct

SEQ ID NO: 747 - DNA, 831 bp, Neisseria cinerea ATCC 14685
cgcgacgctatcccgcatgtttacgatgccctgaaattggacgagaacggtctgactctggaggttcaacagcttctgggcgacggcgttgtccgtactattgcaatgggtagttcagacggccttaaacgcggtatgtctgtaagcaatactggtgcgccaatcactgtgccggtaggtaaaggtacattgggtcgtattgtcgacgtattgggtacgcctgttgatgaagcaggtccgatcgataccgacaaaagccgtgccattcaccaaactgctccgaaattcgacgagttgtcttcagctaccgaattgttggaaaccggtattaaagtgatcgacttgctgtgtccgtttgctaaaggcggtaaagtaggtctgttcggtggtgccggtgtgggcaaaaccgtgaacatgatggaattgatcaacaacatcgccaaagcgcacagcggtctgtccgtgttcgcaggtgtgggtgagcgtacccgtgaaggtaacgacttctaccacgagatgaaagattccaacgtattggataaagtagccatggtgtatggccaaatgaacgaacctccgggcaaccgtctgcgcgttgctttgaccggtttgactatggccgaatacttccgtgacgaaaaagacgaaaacggtaaaggccgcgacgtattgttcttcgttgacaacatctaccgttacactttggccggtactgaagtatctgcactgttgggccgtatgccttctgcagtgggttaccaaccgacattggctgaagaaatgggtcgtttgcaagagcgtattacctctacccaaaccggttccattact

SEQ ID NO: 748 - DNA, 862 bp, Neisseria cuniculi ATCC 14688
ccgtggccaagtaccacaaatttatgacgcactgagtgttgatggcaccgaaacaaccttggaagttcaacagcagttgggtgatggcgtggtgcgtaccattgcgatgggttcaaccgaaggcttgaagcgtggtttgactgtatctaactctggtgcaccgatttctgtgccagtgggtcaagcgactttgggtcgtattatggatgtgttgggtcgtccaatcgacgaggcaggtcctgtaaatgctcaagaaaaatggtcaattcaccgtgaagcaccaagctatgatgagcaatcaaactcaactgagctgctagaaacaggcatcaaagtaattgatttgctttgcccatttgctaaaggtggtaaagttggcttgttcggtggtgcaggtgtgggtaaaaccgtgaatatgatggagctgattaataatatcgctctgaagcattcaggtctttctgtttttgcaggtgttggtgagcgtactcgtgagggtaacgatttttatcacgaaatgcaagaagcaggcgttgttaataccgaagacttcaccaagtcaaaagtagcgatggtttatggtcagatgaatgagccaccaggaaaccgtttgcgtgttgcattgacaggcttgacgatggcagaatatttccgtgacgaaaaagatgaagcaacaggcaaagggcgtgatgttctattgttcgttgataacatctatcgttacacactggctggtacggaagtgtcagcacttctaggtcgtatgccatcagcagtaggttatcaaccgactctggctgaagaaatgggtgcgttgcaagagcgtattacctcaacgcaatcgggttcgatcacttcgggg

SEQ ID NO: 749 - DNA, 844 bp, Neisseria elongata subsp. elongata ATCC 25295
ggaactcccacgtgacgctatcccgcatgtttttgatgcattaaaattagttgaaaatgacctaaccttagaagttcaacaacttttgggggatggtgtagtgcgtaccattgcgatgggtagttcagatggattaaagcgtggtatggctgtgaataataccggagctccgattactgttcctgttggccgtgaaactttgggtcgtatcatggatgtattgggtaatccggttgatgaggcaggtccggtaaatgcatccaatacacgtgcgatccatcaagaggctcctaagtttgatgagctttcttcaacaacggaattattagaaactggcattaaggttatcgacttgttatgtccgtttgccaaaggtggtaaagtaggtctgtttggtggtgcgggtgtaggtaaaaccgtaaatatgatggagttaattaacaacattgccaaggcacatagcggtttgtctgtgtttgcaggcgtgggtgaacgtactcgtgaaggtaatgacttctatcacgagatgaaagattccaacgtattggacaaagtggcaatggtttacggtcagatgaacgaacctccaggcaaccgtctgcgcgttgctttgaccggtttgactatggccgaatacttccgtgacgaaaaagacgaaaacggtaaaggtcgcgacgtattgttcttcgtggacaacatttaccgttacactttggccggtacggaagtatccgcattgctgggtcgtatgccttcagcagtaggttaccaaccgacattggctgaagaaatgggtcgtttgcaagagcgtattacctctacccagacaggctctattacttcc

SEQ ID NO: 750 - DNA, 834 bp, Neisseria flavescens ATCC 13120
cgcgacgctattccgcatgtttacgatgccctgaaattggacgagaacggtctgactctggaagttcaacagcttctgggtgacggcgttgtccgtactattgcaatgggtagttcagacggcctgaaacgcggcatgtctgtaagcaataccggtgcgccaatcactgtgccggtaggtaaaggtacattgggccgtattgtcgacgtattgggtacgcctgttgatgaagcaggtccgatcgataccgacaagagccgtgccattcaccaaactgctccgaaattcgatgagttgtcttcaactaccgaattgttggaaaccggtattaaagtgatcgacttgctgtgtccgtttgctaagggcggtaaagtaggtctgttcggtggtgccggtgtgggcaaaaccgtgaacatgatggaattgatcaacaacatcgccaaagcgcacagcggcctgtccgtgttcgcaggtgtgggtgaacgtacccgtgaaggtaacgacttctaccacgagatgaaagattccaacgtattggataaagtagccatggtgtatggtcaaatgaacgaacctccaggcaaccgtctgcgcgttgctttgaccggtttgactatggccgaatacttccgtgacgaaaaagatgaaaacggtaaaggtcgcgacgtattgttcttcgttgacaacatctaccgttacactctggccggtaccgaagtatccgcactgttgggtcgtatgccttctgcagtgggttaccaaccgacattggctgaagaaatgggtcgtttgcaggagcgtattacttctacgcaaaccggttccattacttcc

SEQ ID NO: 751 - DNA, 834 bp, Neisseria gonorrhoeae ATCC 31426
cgcgacatgattccgcgcgtttacgacgctttgaaattagacgaaaacggtctgactttggaagtccaacagcttttgggtgatggcgtagtccgtaccatcgctatgggcagctcggacggtttgaaacgcggcatgactgtgagcaatactggttcgcccattactgtgccggtaggtaaaggtacgttgggacgcattgtcgatgtattgggaactcctgttgacgaggcaggtccaattgataccgacaagagtcgtgccatccaccaagccgctcctaagtttgacgaactgtcttccacaaccgaattgctcgaaacgggcattaaagtgattgacttgctgtgtccgtttgccaaaggcggtaaagtaggtctgttcggcggtgccggtgtgggtaaaaccgtgaacatgatggaattgatcaacaacatcgccaaagcgcacagcggcttgtccgtgttctcaggcgtgggtgagcgtacccgcgaaggtaacgacttctaccacgagatgaaagattccaacgtattggataaagtagccatggtgtatggccaaatgaacgaacctccaggcaaccgtctgcgcgttgctttgaccggtttgactatggctgaatacttccgtgacgaaaaagacgaaaacggtaaaggtcgtgacgtattgttcttcgttgacaacatctaccgttacactctggccggtaccgaagtatccgcactgttgggccgtatgccttctgcagtgggttaccaaccgacattggctgaagaaatgggtcgtttgcaagagcgtattacctctacccaaaccggttccattacttcc

SEQ ID NO: 752 - DNA, 825 bp, Neisseria gonorrhoeae ATCC 27628
acatgattccgcgcgtttacgacgctttgaaattagacgaaaacggtctgactttggaagtccaacagcttttgggtgatggcgtagtccgtaccatcgctatgggcagctcggacggtttgaaacgcggcatgactgtgagcaatactggttcgcccattactgtgccggtaggtaaaggtacgttgggacgcattgtcgatgtattgggaacgcctgttgacgaggcaggtccaattgataccgacaagagtcgtgccatccaccaagccgctcctaagtttgacgaactgtcttccacaaccgaattgctcgaaacgggcattaaagtgattgacttgctgtgtccgtttgccaaaggcggtaaagtaggtctgttcggcggtgccggtgtgggtaaaaccgtgaacatgatggaattgatcaacaacatcgccaaagcgcacagcggcttgtccgtgttctcaggcgtaggtgagcgtacccgcgaaggtaacgacttctaccacgagatgaaagattccaacgtattggataaagtagccatggtgtatggccaaatgaacgaacctccaggcaaccgtctgcgcgttgctttgaccggtttgactatggctgaatacttccgtgacgaaaaagacgaaaacggtaaaggtcgtgacgtattgttcttcgttgacaacatctaccgttacactctggccggtaccgaagtatccgcactgttgggccgtatgccttctgcagtgggttaccaaccgacattggctgaagaaatgggtcgtttgcaagagcgtattacctctacccaaaccggttccatta

SEQ ID NO: 753 - DNA, 831 bp, Neisseria lactamica ATCC 23970
gatgcgattccgcatgtttacgatgccctgaaattggacgagaacggtctgaccctggaagtccaacagcttttgggtgacggcgttgtccgtactattgcaatgggtagttcagacggcctgaaacgcggcatgtctgtcagcaataccggtgcgccaatcactgtgccggtaggtaaaggtacgttgggccgtattgtcgacgtattgggtacacctgttgacgaagcaggtccgatcgataccgacaagagccgcgccatccaccaaaccgccccgaaattcgacgagttgtcttcaactaccgaattgttggaaaccggcattaaagtgatcgatttgctgtgtccgtttgctaagggcggtaaagtaggtctgttcggtggtgccggtgtgggcaaaaccgtgaacatgatggaattgatcaacaacatcgccaaagcgcacagcggtctgtccgtgtttgcaggcgtgggcgagcgtacccgcgaaggtaacgacttctaccacgagatgaaagattccaacgtattggataaagtagccatggtgtatggtcagatgaacgaacctccgggcaaccgtctgcgcgttgctttgaccggtttgacgatggccgaatacttccgcgacgaaaaagacgaaaacggcaaaggccgcgacgtattgttcttcgtggacaacatctaccgttacaccctggccggtaccgaagtatccgcactgttgggccgtatgccttccgcagtgggttaccaaccgacattggctgaagaaatgggtcgtttgcaagagcgtattacctctacccaaaccggttccattacttcc

SEQ ID NO: 754 - DNA, 836 bp, Neisseria meningitidis strain 2241C
ccacgcgacatgattccgcgcgtttacgacgctttgaaattagacgaaaacggtctgactttggaagtccaacagcttttgggcgacggcgtagtccgtaccattgcgatgggcagctcggacggtttgaaacgcggcatgactgtgagcaataccggtgcgcccattactgtgccggtaggtaaaggtacgttgggacgcattgtcgatgtattgggaacgcctgttgacgaggcaggtccaatcgataccgacaagagccgtgccatccaccaagccgctcctaagtttgacgaactgtcttccacaaccgaattgctcgaaacgggcattaaagtgattgacttgctgtgtccgtttgccaaaggcggtaaagtaggtctgttcggcggtgccggtgtgggtaaaaccgtgaacatgatggaattgatcaacaacatcgccaaagcgcacagcggcttgtccgtgttcgcaggcgtgggtgagcgtacccgcgaaggtaacgacttctaccacgagatgaaagattccaacgtattggataaagtggcaatggtttacggtcagatgaacgaacctccgggcaaccgtttgcgcgtcgcattgaccggtttgaccatggcggaatacttccgtgacgaaaaagacgaaaacggcaaaggccgcgacgtattgttcttcgtggacaacatctaccgttacactctagctggtaccgaagtatccgcattgttgggccgtatgccgtctgcagtgggctaccaaccgacattggcagaagaaatgggtcgtttgcaggagcgtattacctctacccaaaccggttctattacttc

SEQ ID NO: 755 - DNA, 837 bp, Neisseria mucosa ATCC 19696
ccgcgtgatgccattccgcgtgtttacgacgccctgaaattggatgcaaacggcctgactttggaagtgcaacagcttctgggtgacggcgtagttcgtactattgcaatgggtagttcggatggtttgaaacgcggcatgactgtaagcaatacaggtgcgccgattacagtaccggtaggtaaaggtactttgggacgtattgtcgatgtattgggtacgcctgttgacgaagcaggtccgattgataccgacaaacaccgtgccatccatcagacagctccgaaatttgatgaactgtctgcgactactgagctgctggaaaccggcattaaagtgattgacttgctgtgtccgtttgccaaaggcggtaaagtaggtctgttcggtggtgccggtgtaggcaaaaccgtcaacatgatggaattaattaacaacatcgccaaagcacatagcggtttgtccgtgtttgcaggtgtgggtgagcgtacccgtgaaggtaatgacttctaccacgagatgaaagattccaacgtattggacaaagtggcgatggtttacggtcagatgaacgaacctccgggtaaccgtctgcgtgtagccttgaccggtttgacgatggccgaatacttccgtgatgaaaaagacgaaagcggcaaaggccgtgacgtattgttcttcgtggacaatatctaccgttacaccctggccggtaccgaagtatccgcattgttgggtcgtatgccttcagcagtaggttaccaaccgacattggctgaagaaatgggtcgtttgcaagagcgtattacctctacccaaacaggctccattacctcc

SEQ ID NO: 756 - DNA, 834 bp, Neisseria subflava ATCC 14221
cgcgacgctatcccgcatgtttacgatgccctgaaattggacgagaacggtctgactctggaagttcaacagcttctgggtgacggcgttgtccgtactattgcaatgggtagttcagacggcctgaaacgcggcatgtctgtaagcaatactggtgcgccaatcactgtgccggtaggtaaaggtacattgggtcgtattgtcgacgtattgggtacgcctgttgatgaagcaggtccgatcgataccgacaagagccgtgccattcaccaaactgctccgaaattcgacgagttgtcttcaactaccgaattgctggaaaccggtattaaagtgatcgacttgctgtgtccgtttgctaagggcggtaaagtaggtctgttcggtggtgccggtgtgggcaaaaccgtgaacatgatggaattgatcaacaacatcgccaaagcgcacagcggtctgtccgtgttcgcaggtgtgggtgaacgtacccgtgaaggtaacgacttctaccacgagatgaaagattccaacgtattggataaagtagccatggtgtatggccaaatgaacgaacctccgggcaaccgtctgcgcgttgctttgaccggtttgactatggccgaatacttccgtgacgaaaaagacgaaaacggtaaaggtcgcgacgtattgttcttcgttgacaacatctaccgttacactctggccggtaccgaagtatctgcactgttgggccgtatgccttctgcagtgggttaccaaccgacattggctgaagaaatgggtcgtttgcaagagcgtattacctctacccaaactggttccattacttcc

SEQ ID NO: 757 - DNA, 833 bp, Neisseria weaveri ATCC 51223
cccgtgatgctattcccatgtatacgatgccctgaaattggtagataacgatctgaccctggaagtgcaacaacttttaggtgatggtgtggttcgtaccattgcaatgggtagttcagacggcctaaaacgtggtatggctgttaacaataccggcgctccgattactgttccggtggggaaagccaccttgggacgtattatggatgtgttgggtaatccggttgatgaagcaggtcctgttgtatcagaagaaactcgcgctattcatcaagctgcccctaaatttgacgaactgtcttcagcaactgagttgttggaaacaggcattaaagtaattgacttgctgtgcccgtttgccaaaggtggtaaagtaggtttgtttggtggtgccggcgtgggtaaaaccgtaaatatgatggagttgatcaacaacatcgcgaaggcacatagtggtttgtctgtattcgccggtgtaggtgagcgtacccgtgaaggtaacgacttctaccatgaaatgaaagactctaacgtattggataaagtagccatggtttatggccagatgaatgaacctccgggtaaccgtttgcgcgttgctttgactggtttgactatggccgaatatttccgtgacgagaaagatgaaaacggcaaaggtcgtgacgtcttgttctttgtggataatatctatcgctatactctggccggtactgaagtgtctgcactgttaggtcgtatgccgtctgcagtaggttatcagcctacattggcagaagaaatgggtcgcttgcaggagcgtattacttctactcaaacaggttcgattactt

SEQ ID NO: 758 - DNA, 833 bp, Neisseria animalis ATCC 19573
cgcgatgccattcctcacgtttacgatgccctgaaattggacgacaccggtctgactttggaagtacaacaacttctgggcgacggtgtggtacgtaccattgcaatgggtagttcagacggcctgaaacggggtttgtctgtgagcaataccggttctccgattgccgttcctgtcggtaaagcgactttgggtcgtattatggacgtattgggcaatccggttgatgaagccggtccggttgctaccgaagagaaacgtgctattcaccaagccgcaccgaagtttgatgaattgtcatcagctaccgagttgttggaaaccggtattaaagtaatcgacttgctgtgtccgtttgcaaaaggcggtaaagtaggtctgttcggcggtgccggtgtgggcaaaaccgtaaacatgatggaattgatcaacaacatcgccaaagcacacagcggtctgtctgtgtttgccggtgtaggtgaacgtacccgcgaaggtaacgacttctaccacgagatgaaagattccaacgtgttggataaagtagccatggtgtacggtcagatgaatgagccgccgggcaaccgcttgcgcgtggctttgaccggcctgactatggccgaatacttcgtgacgaaaaagacgaaaacggcaaaggtcgtgacgtattgttcttcgtggacaacatttaccgctacacactggccggtaccgaagtatcagcattgttgggccgtatgccgtctgcagtaggttatcagccgacattggcagaggaaatgggtcgcttgcaagagcgtattacctctacccaaaccggttcgattacctct

SEQ ID NO: 759 - DNA, 819 bp, Proteus penneri ATCC 33519
agcgtccctaaagtatacgacgctcttgaggttatgaatggtaaagaaaaactggtgctggaagttcagcaacagttaggcggtggtatcgttcgttgtatcgcaatgggtacatcagacggtttaagccgtggcttaaaagttgaagatttaggccacccaattgaagtaccagtaggtaaagcaacactgggacgtatcatgaacgttctgggtacacctattgatatgaaaggtgatattgcaactgaagaacgttggtctattcaccgtgaagcaccaacctacgaagagttatcaaactcacaagaactgcttgaaaccggtatcaaagtaatggacttaatctgtccgtttgctaaaggtggtaaagtaggtctgttcggtggtgcgggtgtgggtaaaacagttaacatgatggaattgatccgtaatatcgcgatcgagcactcaggttactctgtatttgctggtgttggtgagcgtactcgtgagggtaacgacttctatcatgaaatgacagattctaacgttcttgacaaagtatcgttagtttatggtcagatgaatgagccaccaggaaaccgtctgcgtgtagcactgactggtctgactatggctgaaaaattccgtgatgaaggccgtgacgtactgttattcgtcgataacatttatcgttacaccttagccggtacagaagtatcagcactgttaggtcgtatgccatcagcggtaggttaccagccaacattggctgaagagatgggtgttctgcaagaacgtatcacttcaaccaaaacaggttcaatcacctctgta

SEQ ID NO: 760 - DNA, 819 bp, Salmonella choleraesuis subsp. choleraesuis ATCC 13076
gccgtaccacgcgtgtacgatgcccttgaggtgcagaatggtaatgagaagctggtgctggaagttcagcagcagcttggcggcggtatcgtgcgtaccatcgcgatggggtcttctgacggtctgcgtcgcggtctggatgtaaaagatctcgaacacccgatcgaagtcccggtaggtaaagccacgctgggtcgtatcatgaacgtcctgggcgaaccggtcgacatgaaaggcgagatcggcgaagaagagcgttgggcgattcaccgcgcagcaccttcctacgaagagttgtcaaactctcaggaactgctggaaaccggtatcaaagttatcgacctgatgtgtccgttcgcgaagggcggtaaagtcggtctgttcggtggtgcgggtgtaggtaaaaccgtaaacatgatggagcttattcgtaacatcgcgatcgagcactccggttactcagtgtttgcgggcgtaggggaacgtactcgtgagggtaacgacttctaccacgaaatgaccgactccaacgttatcgataaagtatccctggtgtatggccagatgaacgagccgccgggaaaccgtctgcgcgttgcactgaccggcctgaccatggcggagaaattccgtgacgaaggtcgtgacgtactgctgttcgtcgataacatctatcgttacaccctggccggtacggaagtatccgcactgctgggccgtatgccttccgcagtaggttaccagccgactctggcggaagagatgggcgttctgcaggaacgtatcacctccaccaaaaccggttctatcacctccgta

SEQ ID NO: 761 - DNA, 812 bp, Yersinia pestis strain KIM D27
accaaaagtgtacaacgcccttgaggtagaaggtacaactgaaaagttagtgctggaagttcagcaacagttgggcggtggtgttgttcgttgtatcgcaatgggctcttccgatggtctgagccgtgggttgaaagtaaccaacctagaacacccgatcgaagtaccggttggtaaagcgacccttggccgtatcatgaacgtattgggtgaaccaatcgacatgaaaggtcctatcggtgaagaagagcgttgggcaatccatcgcgaagcgccttcttatgaagagcttgctagctcacaagatctgttagaaaccggtatcaaggttatggacctgatttgtccgtttgctaagggcggtaaagtcggtctgttcggtggtgcgggtgtaggtaaaacagtaaacatgatggagctgatccgtaacatcgcgatcgagcactctgggtattctgtatttgccggtgtaggtgagcgtacccgtgagggtaatgacttctaccatgaaatgactgactccaacgttttggacaaagtatccttggtttacggccagatgaatgagccaccaggtaaccgtctacgcgttgcactgaccggcctgaccatggcggagaaattccgtgatgaaggtcgtgacgtactgctgtttatcgataatatctatcgttataccctagctggtacggaagtatccgcattgctgggtcgtatgccatcagcggtaggttatcagccaacactggctgaagagatgggtgtgttgcaggaacgtattacttccactaagacgggttcaatcacctctg

SEQ ID NO: 762 - DNA, 408 bp, Burkholderia mallei strain GB8
cgacgtgatcgagcccttcttcgtcgacgtgatgcgctcttgcagcttgcccatttcttcagccagcgtcggctgatagcccactgccgacggcatacggccgagcagcgccgacacttcggtaccggccagcgtgaaacggtagatgttgtcgacgaagaacagcacgtcgaggccttcgtcacggaagtgctcggccatcgtgaggcccgtcagcgccacgcgcagacggttgcccggcggctcgttcatctggccgtacaccagcgcgaccttgtcgagaacgttcgagtccttcatttcgtggtagaagtcgttcccttcacgggtacgctcgcccacgcccgcgaacacggagtaaccgccgtgctccttcgcgatgttgttgatgagctccatcatgttgac

SEQ ID NO: 763 - DNA, 400 bp, Clostridium sordellii ATCC 9714
gaacttataaacaacatagctactcaacatggtggtatatcagtattcgcaggtgttggagagagaacaagagaaggtaacgacctttacggagaaatgagtgagtctggagttataaacaagacagctctagtattcggacaaatgaatgagccacctggagcaagaatgagagttgctttaactggtcttacaatggctgaatatttcagagatcaagaaggacaagacgttttattattcgtagataatatattccgtttcactcaagcaggatctgaggtttctgcacttcttggacgtactccatcagcagttggataccaaccaacattagctacagagatgggtagattacaagagagaataacatctacaaataaagggtctataacatcag

SEQ ID NO: 764 - DNA, 405 bp, Clostridium novyi ATCC 19402
ttaattcaagaattaatcaacaatatagcgaaggaacacggtggattatctgtatttacaggagttggagaaagaacaagagaaggtaatgacctttactatgaaatgaaagaatctggtgttataaataaaacagcactagtatttggtcaaatgaatgagccacctggagcaagaatgagagttgctcttacaggacttactatggcagaatatttcagggatcaaggacaaaacgtacttttattcatagacaacatatttagattcactcaagcaggttcagaggtgtcagctttacttggaagaatacctagtgccgttggataccaaccaacactagcaacagaaatgggtgcgcttcaagaaagaataacatctacaaagcatggttctataacatca

SEQ ID NO: 765 - DNA, 393 bp, Clostridium botulinum strain 20:3.1
aattaataaataacatagctaaagaacatggtggattatcagtgtttactggagttggagaaagatctagagaaggtaatgatctttatcatgaaatgagagaatcaggcgttatagataaaaccgcattagtatttggtcaaatgaatgagccacctggtgctagaatgagagttgcattaacagggttaactatggctgaatattttagagataaaggtcaagatgtattactatttatagataatatatttagatttactcaagctggatcagaagtttcagcattacttggaagaataccatcagcagttggttaccaaccaactttagcaactgaaatgggtgcacttcaagagagaattacatcaactaagaatggttctataacat

SEQ ID NO: 766 - DNA, 399 bp, Clostridium histolyticum ATCC 19401
aggaacttataaataatattgcaaaacaatatggaggtctatctgtatttacaggtgttggtgaaagaacaagagaaggtaatgacctatataatgaaatgaaagattctggggttatagagaaaactgcactagtatttggacagatgaatgaaccaccaggagcgagaatgagagtagcattgacaggacttactatggcagaatattttagagatcaagggcaagatgtacttttatttatagataatatatttagatttacgcaggctggttctgaagtttctgcattgttaggaagaattccaagtgcagttggatatcaaccaacccttgcaactgaaatgggtgcattacaagaaagaataacatccacaaaaaatggatcaattacttcag

SEQ ID NO: 767 - DNA, 390 bp, Peptostreptococcus prevotii ATCC 9321
catgatggaactgatccgtaacatcgccatcgagcacagcggttattccgtgttcgccggtgtgggtgagcgtactcgtgagggtaacgacttctaccacgagatgaaggactccaacgttctggacaaagtggcactggtctacggtcagatgaacgagccgccgggtaaccgtctgcgcgtagcactgactggcctgaccatggccgagaagttccgtgacgaaggtaacgacgttctgttgttcgtcgacaacatctaccgttacaccctggccggtactgaagtatccgcactgctgggccgtatgccttcggcagtaggttaccagccgaccctggctgaagagatgggcgttctgcaagaacgtatcacttcgaccaaggaagg

SEQ ID NO: 768 - DNA, 953 bp, Absidia corymbifera ATCC 46775
aggtcttgttcgtggcaaaaggtcattgacactggtgctcctatcaccattcctgttggtaacgaagtccttggtcgtatcattaacgtcattggtgagcccattgatgagcgtggtccyatcaagtccaaggccactcgtgctatccacgctgatgctcccgagttcgttgatcaatcccccactcccgagattctcgagactggtatcaaggttgtcgatttgcttgctccctatgctcgtggtggtaagattggtcttttcggtggtgccggtgtcggcaagactgtcttgattcaagaattgatcaacaacattgccaaggctcacggtggttactctatcttctgtggtgtcggtgaacgtactcgtgaaggcaacgatttgtaccacgaaatgatttccactggtgtcatcaagcttgaaggtgaatccaagtgtgctcttgtctttggtcaaatgaacgaaccccccggagctcgtgcccgtgttgccttgactggtttgaccattgccgaatacttccgtgatgaggaaggtcaagatgtgttgctcttcattgacaacattttccgtttcactcaagccggttctgaagtgtccgctttgcttggtcgtattccctctgctgtcggttaccaacccactctytccactgatatgggtggtatgcaagagcgtattactaccaccaagaacggttccattacctccgtgcaagctgtctacgtccctgctgacgatttgactgatcctgctcctgctactacttttgctcacttggacgccaccactgtgttgtctcgttccattgctgagttgggtatctaccctgctgtcgatccccttgactccaagtcccgtatcttggatccccgtatcgttggtgatgagcactactctgttgccactggtgtccaacaaatccttcaaaactacaagtcgcttcaaga

SEQ ID NO: 769 - DNA, 1343 bp, Alternaria alternata ATCC 62099
cgcggttccaaggccaccgacaccggtgcccccatcaagattcccgttggtcacggtacccttggtcgtatcatgaacgtcactggtgaccccattgacgagcgtggtcccatcaaggccaccaagtacgctcccatccacgccgaccccccggagttcaccgagcaatccacctccgctgaggtcctcgttaccggtatcaaggttgtcgacctgttggctccttacgctcgtggtggaaagattggtctcttcggaggtgctggtgtcggaaagactgtcttcattcaggagctgattgtaaggagacacactgtctactggctgagcattagctaacggcaggcagaacaacatcgccaaggcccacggtggtttctctgtcttcactggtgtcggtgagcgtacccgtgagggtaacgatctgtaccacgagatgcaggagacttccgtcattcagcttgacggtgactccaaggtcgccctcgtcttcggtcagatgaacgagcccccgggtgcccgtgcccgtgtcgctcttactggtcttactgttgctgagtaagtcttgaattcactgtgttgacaacgtcgtggctaatgggaaaaaagatacttccgtgacgaagagggacaggatgtgcttctcttcatcgacagtaagtgcttgtacgaactgcctgtgagacatacactgacttcggcaatagacattttccgtttcacccaggccggttccgaggtgtccgctcttcttggtcgtatcccctctgccgtcggttaccagcccaccctcgccattgacatgggtgtcatgcaggagcgtattaccaccaccaccaagggttccatcacctccgtccaggccgtctacgtgcccgctgacgatttgactgaccctgcccccgccaccaccttcgcccatttggacgccaccactgtcttgtcccgtggtatctccgagttgggtatctaccccgccgtcgaccctcttgactccaagtcccgtatgttggacccccgtgtcattggtcaggaccactacgacaccgccacccgcgttcagcagattctccaggagtacaagtcgctccaggatatcattgccattctcggtatggacgagttgtcggaagctgacaagcttaccgtcgagcgtgcccgtaagatccagcgtttcttgagccagcctttcgctgtcgcccaggtcttcactggtattgagggcaagcttgtcgacctcaaggacaccatccgatcattcaaggctatcttgactggtgagggtgacgaccttcccgagggtgagtctcgactatctccgcattcatagcgtataactgaca

SEQ ID NO: 770 - DNA, 480 bp, Aspergillus flavus ATCC 26947
ttcaggagttgattgtatgttcacctgcaacataagacttcccattctccactcttttctaactcttcacagaacaacattgccaaggctcacggtggttactctgtcttcactggtgtcggtgagcgtacccgtgagggtaacgatctgtaccacgaaatgcaggagactggtgtcattcagctcgagggtgaatctaaggtcgcccttgtcttcggtcagatgaacgagcccccaggtgcccgtgcccgtgtcgcccttaccggtctgaccatcgccgagtacttccgtgacgaggaaggtcaggatgtgctgctcttcattgacaacattttccgtttcacccaggccggttctgaggtgtctgcccttcttggtcgtatcccctccgctgtcggttaccagcccactctggccgtcgacatgggtggtatgcaggagcgtattaccaccaccaccaagggttccattacctccgtc

SEQ ID NO: 771 - DNA, 1174 bp, Mucor circinelloides ATCC 38592
  misc_feature (1)...(1174): n=a,t,c or g
ctcgaacaagayaacttgccygccattttgaacgcccttgaagtcaaggaycactctggtggacgtctcgtyctcgaagtctctcaacatttgggtgagaacactgtccgtactattgctatggatggtactgaaggtaagttatgtycatcccannggatacagtcaracagmaatgtctagtggttatagcagyagcagatgattgaccaatatgttaggtcttgtccggtggtcaaaaggttgttgacactggtgctcccattaccatccccgttggtaaggaagtccttggtcgtatcatcaacgttattggtgaacccattgatgaacgtggtcccattgacgccaagactcaccgtcctattcacgctgaagctcccgaattcgttgatcaatcccccactcccgaaatcctcgagactggtatcaaggtygtcgatttgttggctccttatgctcgtggtggtaagattggtctcttcggtggtgctggtgtcggtaagactgtcttgattcaagaattgattaacaacatygccaaggctcacggtggttactctatcttctgtggtgtcggtgaacgtactcgtgagggtaacgatttgtaccatgaaatgattgaaaccggtgtcattcaattggaaggcgagtccaagtgtgctctcgtctttggtcaaatgaacgaacccccaggtgctcgtgcccgtgtcgctttgactggtttgactattgctgaatacttccgtgatgatgagggtcaagatgtcttgcttttcattgataacattttcagattcactcaagctggttctgaggtatctgcccttttgggtcgtattccttccgctgtcggttaccaacccactctttccacygatatgggtggtatgcaagagcgtattactaccaccaagaacggttccattacctccgtccaagctgtctacgtccctgctgatgatttgaccgatcctgctcctgccaccacttttgctcacttggatgccaccactgtcttgtctcgttccatcgctgaattgggtatctaycccgctgtcgatcctcttgattccaagtctcgtatcctcgatccccgtattgtcggtgatgagcactacaaggttgccactgaagttcaacaaatcctccaaaactacaagtctctccaaga

SEQ ID NO: 772 - DNA, 467 bp, Piedraia hortai ATCC 24292
aggagcttatcaacaacatcgccaaggctcacggtggttactccgtcttcactggtgtcggtgagcgtactcgtgagggtaacgatttgtaccacgagatgcaagagacttccgtcattcagcttgacsgcgagtccaaggtcgctctcgtgttcggtcagatgaacgagcccccgggtgcccgtgcccgtgttgccctgactggtcttaccatcgctgagtacttccgtgatgccgagggtcaggatggtaagttctataactcttgtcgcaaaggtttcattctggtcgctaacttgctcagtgctcctgttcatcgacaacattttccgtttcacccaggctggtatggaggtgtctgccctcctcggtcgtattccttctgccgtcggttaccaacctactctcgccgtcgacatgggtggtatgcaagagcgtattaccactaccaagaagggatccattac

SEQ ID NO: 773 - DNA, 578 bp, Pseudallescheria boydii ATCC 44331
ttgccaaggcccacggtggttactctgtcttcactggtgtcggtgagcgtacccgtgagggtaacgatctgtaccacgaaatgcaggaaacctccgtcattcagcttgatggcgagtccaaggtcgcgcttgtcttcggtcagatgaacgagccccctggtgcccgtgctcgtgtcgctcttactggtcttaccgttgccgagtacttccgtgatgaggagggtcaggatggtaagttatatcgtttttattatcttctttgccaccacccctctacgaatccatgcctccgttggtgaaggcatcgtttgtagggcgggtcggagtttgcggcaatttctgccgtcggcttgaagccgcggatgcccgatgtttgacgcgtatcgatgctaacaacaatgacaacagtgcttctcttcattgacaacattttccgattcacccaggccggttccgaggtgtctgcccttctcggtcgtattccctctgccgtcggttaccagcccactcttgccgtagacatgggtgccatgcaggaacgtattaccaccaccaagaagggttcgattacctccgtc

SEQ ID NO: 774 - DNA, 1123 bp, Rhizopus oryzae ATCC 56015
aacttaccygctatcttgaacgctctcgaagtccaagatcactctggtggacgtcttgtccttgaagttcgctcaacacttgggtgaaaatactgtccgtactattgctatggatggtactgaaggtaagctatactataaccgtkttatccgagtatgatattaacttgaaaaaaggtctcgtycgtggtcaaaaggttattgacactggtgctcccattaccattcctgytggtaaggaagttctcggtcgtatcattaacgtcattggtgaacccatcgatgaacgtggtcctatcaacgccaagagccaacgtcccattcacgccgaagctcccgaattcgttgaccaatctcctactcccgaaattcttgaaactggtatcaaggttgtcgacttgttggctccttatgctcgtggtggtaagattggtcttttcggtggtgctggtgtcggtaagactgtgttgattcaagaattgattaacaacatcgccaaggctcacggtggttactctattttctgtggtgtcggtgaacgtactcgtgaaggtaacgatctttaccacgaaatgattgaaactggtgtcatcaagctcgatggtgactccaagtgtgctcttgtctttggtcaaatgaacgaacccccaggagctcgtgcccgtgttgccttgactggtttgaccattgctgaatacttccgtgatgatgaaggtcaagatgtgttgcttttcattgataacattttccgtttcacccaagctggttcwgaagtatctgcccttttgggtcgtattccctccgctgtcggttaccaacccactctttctactgatatgggtggtatgcaagaacgtattacaaccaccaagaacggttccattacatccgtccaagctgtctacgtccctgctgatgatttgaccgatcctgctcccgccaccacttttgctcacttggatgccaccactgtcttgtctcgttccattgccgaattgggtatttaccctgccgtcgatcctcttgaytccaagtctcgtatcttggatcctcgtatcgttggtgacgaacactacaaggtcgctaccgaagttcaacaaatccttcaaaactacaagtctct

SEQ ID NO: 775 - DNA, 477 bp, Scopulariopsis koningii ATCC 38745
attcaggagctcatcaacaacattgccaaggctcacggtggttactctgtgttcactggtgtcggtgagcgtacccgtgagggtaacgatctgtaccacgaaatgcaggagacttcggtcattcagctcgagggcgagtccaaggtcgcgcttgtgttcggtcagatgaacgagccccccggtgcccgtgcccgtgtcgcccttaccggtctgaccgttgccgagtacttccgtgacgaggagggccaggatggtgagtaaccgacgaagtctgagatcttgtcgggcattattctaacgacaactagtgcttctcttcatcgacaacattttccgcttcacccaggccggttccgaggtgtccgcgcttctcggccgtatcccctctgccgtcggttaccagcccaccctggccgtcgacatgggaggtatgcaggagcgtattaccacgactcagaagggctcgattacctcggt

SEQ ID NO: 776 - DNA, 610 bp, Trichophyton mentagrophytes ATCC 8125
tccggagttgattgtaagtcatttgaaacccagccccaagaaacagaagctaggcgaaaattggacaattgagcaatttagccattggagaaaagaaatttcgagtattaattgtttttatagaacaacattgccaaggctcacggtggttactctgtcttcactggtgtcggagagcgtacccgtgaaggaaacgatctctaccatgaaatgcaggagacccgtgtcattcagcttgatggcgagtccaaggtcgccctggtcttcggccagatgaacgagcccccaggtgcccgtgcccgtgttgctcttactggtttgaccattgctgagtacttccgtgatgaggaaggtcaagacggtgagtttyttatggataaaarattttttttttttttttttttttmaaraaattcatgttctaacaaagtatatcctagtgcttctcttcatcgacaacattttccgtttcactcaggctggttccgaagtgtctgccctgcttggtcgtatcccatctgccgtcggttaccaacccactcttgccgtcgacatgggtggtatgcaggaacgtattaccaccaccaagaagggatccattacctccgtc

SEQ ID NO: 777 - DNA, 593 bp, Trichophyton tonsurans ATCC 56185
ggagttgattgtaagtcatttgaaacccagccccaagaaacagaagctaggtgaaaattggacaattgaacaatttagcccttggagaaaagaaatttcgagtattaattatttttatagaacaacattgccaaggctcacggtggttactctgtcttcactggtgtcggagagcgtacccgtgaaggaaacgatctctaccatgaaatgcaggagacccgtgtcattcagcttgatggcgagtccaaggtcgccctggtcttcggccagatgaacgagcccccaggtgcccgtgcccgtgttgctcttactggtttgaccattgctgagtacttccgtgatgaggaaggtcaagacggtgagtttcttatggatgaaagatttttttttttcaagaaattcatgttctaacaaagtgtattctagtgcttctcttcatcgacaacattttccgtttcactcaggctggttccgaagtgtctgccctgcttggtcgtatcccatctgccgtcggttaccaacccactcttgccgtcgacatgggtggtatgcaggaacgtattaccaccaccaagaagggatccattacctcc

SEQ ID NO: 778 - DNA, 1141 bp, Trichosporon cutaneum ATCC 62965
ccgtggtcaagaagttattgacactggtgccccaattaccattcctgttggtcgtggtactcttggtagaattatcaacgtcattggtgaaccaattgacgaacgtggccctatcaaggcttctaagtatgctcctatccatactgaaccaccaacctttgctgaacaatctacttctgctgaagttcttgaaaccggtatcaaggttgtcgatcttcttgctccttacgcccgtggtggtaagattggtcttttcggtggtgctggtgtcggtaagactgtcttcattcaagaacttattaacaacattgccaaggctcacggtggtttctctgtcttcactggtgtcggtgaaagaacccgtgaaggtaacgatctttaccgtgaaatgaaggaaactggtgtcatcaacctcgaaggtgactccaaggtcgctctcgttttcggtcaaatgaacgaacctccaggtgcccgtgcccgtgtcgctttgactggtcttaccattgccgaatacttccgtgatgaagaaggacaagatgtcttgcttttcgttgacaacattttcagattcacccaagccggttctgaagtctctgctcttttgggtcgtattccatctgccgtcggttaccaacctacccttgctaccgatatgggtgccctccaagaacgtattaccaccacccaaaagggttccgtcacatctgtccaagccgtctatgtcccagcagacgatttgactgatcctgccccagccaccactttcgctcacttggacgccaccactgtcttgtctcgttccatttccgaattgggtatctacccagctgtcgatcctctcgattccaagtctcgtcttttggatcctgaagttattggacacgaacactacgaagttgccactcaagttcaacaaaccctccaagcttacaagtctctccaagatatcattgccattttgggtatggatgaattgtctgaagctgataagcttactgtcgaacgtgcccgtaagatccaaagattcctttcccaaccattcgctgttgccgaagttttcactggtatcgaaggtcgtctcgttccattgaaggaaaccgtcagatctttcaaggaaatccttgaaggtaagtacgatcac

SEQ ID NO: 779 - DNA, 1093 bp, Cladophialospora carrionii ATCC 22864
gctgaaggccgaacgtgagcgtggtatcaccatcgatatcgcgctctggaagttcgagactcccaagtacttcgtcaccgtcatcgatgcccctggtcatcgtgacttcatcaagaacatgatcactggtacctcccaggctgattgtgctattctcatcattgccgctggtactggtgagttcgaggccggtatctccaaggatggccagacccgtgagcatgctctgctcgcctacaccctgggcgtgaagcagcttatcgtcgccatcaacaagatggacaccaccaaatggtctgaggatcgtttcaacgaaatcatcaaggagacttccaacttcatcaagaaggtcggatacaaccccaagtccgttccattcgtgcccatctccggcttcaacggtgacaacatgatcgacgtctccaccaatgccccctggtacaagggctgggaaaaggagtccaaggctggcaaggccaccggcaagaccctccttgaggctatcgactccatcgaccctcctgctcgtcccaccgacaagcctctccgtctcccactccaggatgtctacaagatttctggtatcggcacggtgcccgtcggtcgtgttgagactggtaccatcaaggccggtatggtcgtcacctttgcccccgccaacgtcaccactgaagtcaagtccgtcgaaatgcaccacgaacagctcgccgagggcgttccgggtgacaacgtcggcttcaacgtcaagaacgtctccgtgaaggaggttcgtcgtggaaacgttgctggtgactccaagaacgacccccccaagggtgccgactccttcaacgcccaggtcatcgtcctcaaccaccctggtcaggtcggtgctggctacgccccggtcttggattgccacactgcccacattgcctgcaagttctctgagctcctcgagaagatcgatcgtcgtaccggcaagtccatggaaaacaaccccaagttcatcaagtctggtgatgctgccatcgtgaagatggttcccagcaagcctatgtgcgttgaggctttcaccgactaccctcctcttggtcgtttcgccgtccgtgac

SEQ ID NO: 780 - DNA, 752 bp, Cunninghamella bertholletiae ATCC 42115
tacttgtaaatggtctcaagatcgttacaacgaaattgttaaggaagtttcttccttcatcaagaagattggttacaatcctaaatccgttcctttcgtycctatctctggttggcacggtgataacatgttggaagcttctaccaacatgccttggtacaagggatggaccaaggaaactaaagctggttcttccactggtaagactctcttagaagccattgacagcattgaacctcctacccgtccttctgacaagcctttacgtcttcctttacaagatgtttacaagattggtggtattggtactgtccctgttggtcgtgttgaaactggtgtcatcaaggctggtatggttgttacyttcgctcccgctaacgtcaccactgaagttaagtccgttgaaatgcatcacgaacaattagaacaaggtgttcctggtgacaacgttggtttcaacgtcaagaacgtttccgttaaggatatccgtcgtggtaacgtctgttccgactccaagaacgaccccgctaaggaatctgcttccttcaacgctcaagttatcgtcttgaaccaccctggtcaaattggtgctggttatgccccagttcttgactgtcacactgctcacattgcttgtaagttcgctgaattattagaaaagatcgatcgtcgttccggtaagaaactcgaagatgctcctaaattcgttaaatctggtgactctgctatcgttaagatggttccttccaagc

SEQ ID NO: 781 - DNA, 728 bp, Curvularia lunata ATCC 26425
caagtggtctgaggaccgttaccaggaaatcatcaaggagacctccaacttcatcaagaaggtcggctacaaccccaagcacgttcccttcgtccccatctccggtttcaacggagacaacatgattgaggcctccaccaactgcccctggtacaagggttgggagaaggagaccaaggccaaggccactggtaagaccctccttgaggccatcgacgccatcgaccctcctgtccgtcctaccgacaagcccctccgccttcccctccaggatgtttacaagattggtggtattggcacggtccccgtcggtcgtgtcgagaccggtatcatcaagcccggtatggtcgtcaccttcgcccccgctggtgtcaccaccgaagtcaagtccgtcgagatgcaccacgagcagcttactgagggtgtccccggtgacaacgtcggcttcaacgtcaagaacgtctccgtcaaggagatccgtcgtggtaacgttgccggtgactccaagaacgacccccccaagggttgcgagtccttcaacgcccaggtcatcgtcctcaaccaccctggtcaggtcggtgccggttacgccccagtccttgactgccacactgcccacattgcctgcaagttctccgagctcctcgagaagatcgaccgccgtaccggaaagtctgttgagaactcccccaagttcatcaagtccggtgacgccgccatcgtcaaga

SEQ ID NO: 782 - DNA, 1145 bp, Fonsecaea pedrosoi ATCC 18831
tgaagtccgagcgtgagcgtggtatcaccatcgatatcgccctctggaagttcgagactcccaagtaaggctcaacagacacaacaagcaaatgcatactcgctaacctattcacccaccacaggtacaacgtcaccgtcattgacgcccccggtcaccgtgatttcatcaagaacatgatcactggtacctcccaggctgactgcgccattctcatcattgccgccggtactggtgagttcgaggccggtatctccaaggacggtcagacccgtgagcacgctcttctcgcctacacccttggtgtcaagcagctcatcgttgccatcaacaagatggacaccaccaagtggtctgaggcccgttaccaggagatcatcaaggagacctccggtttcatcaagaaggtcggcttcaaccccaagcacgttcccttcgtgcccatctccggtttcaacggtgacaacatgatcgacgtctccaccaactgcccctggtacaagggttgggagaaggagaccaaggccaaggccaccggcaagaccctcctcgaggccattgacgccatcgacccccccactcgtcccaccgacaagcccctccgtcttcccctycaggatgtctacaagatcggtggtattggcacggttcccgtcggtcgtgtcgagaccggtaccatcaaggccggcatggtcgtcaccttcgcccccgctggtgtcaccactgaggtcaagtccgtcgagatgcaccacgagcagcttcccgagggtctccccggtgacaacgtcggcttcaacgtcaagaacgtctccgtcaaggagatccgtcgtggcaacgtcgccggtgactccaagaacgacccccccaagggctgcgacagcttcaacgcccaggtcatcgtcctcaaccaccccggtcaggtcggcgccggctacgcgcccgtcctcgactgccacactgctcacattgcttgcaagttctctgagctcctcgagaagatcgaccgccgtaccggcaagtccattgaggccagccccaagttcatcaagtctggtgacgccgccatcgtcaagatggttccctccaagcctatgtgcgttgaggccttcaccgactacccccctcttggacgtttcgccgtccgt

SEQ ID NO: 783 - DNA, 1151 bp, Microsporum audouinii ATCC 11347
gctcaaggctgagcgtgagcgtggtatcaccattgacatcgccctctggaagttcgagacccccaagtacatggtcaccgtcatcggtatgctttatctgtttcccatttatagttgcgacaagtaactaataaaaagtagatgcccccggacaccgtgacttcatcaagaacatgattactggtacctcccaggccgactgcgctattctcatcattgctgccggtactggtgagttcgaggctggtatctccaaggatggccagactcgtgagcacgccctgctcgctttcaccctcggtgtcaagcagctcatcgttgccatcaacaagatggacaccaccaactggtctgagtcccgtttcggtgaaatcatcaaggaagtcaccaacttcatcaagaaggtcggctacgaccccaagggtgtcccattcgtcccaatctctggcttcaacggtgacaacatgattgagccctccaccaactgcccatggtacaagggatggaacaaggagaccaaggccggtggcaaatcctctggtaagaccctccttgaggccatcgatgccattgacatgcccactcgtcccaccgacaagcctctccgtctcccactccaggatgtctacaagatctctggtatcggaacagtaccagtcggtcgtgttgagactggtatcatcaagcctggtatggttgtcactttcgcccccgccaacgtcaccactgaagtcaagtccgtcgaaatgcaccaccagcagctcgttcagggtgttcccggtgacaacgttggcttcaacgtcaagaacgtctctgtcaaggaagtccgccgtggtaacgttgccggtgattccaagaacgacccaccatctggctgcgcctctttcaaggcccaggtcatcgtcctcaaccaccccggccagatcggtgctggttacgccccagtcctcgactgccacactgcccacattgcttgcaagttctctgagcttcttgagaagattgaccgccgtactggtaaatccgtcgaaaccagccctaagttcgtcaagtctggtgatgccgctattgccaccatggttccatccaagcccatgtgcgttgaggctttcactgactacccaccacttggtcgtttcgccgtccgtgac

SEQ ID NO: 784 - DNA, 979 bp, Mucor circinelloides ATCC 38592
ccaagtggtctcaagatcgttacaacgaaattgtcaaggaagtttccggtttcatcaagaagatcggtttcaaccccaagtccgttcctttcgttcccatttctggctggcacggtgataacatgttggatgaatccaccaacatgccctggttcaagggatggaacaaggagaccaaggccggttccaagactggtaagactctcctcgaagccatcgatgccattgagccccctgtccgtccttctgacaagcctctccgtcttcctcttcaagatgtctacaagattggtggtattggtacagttcccgtcggtcgtgttgaaactggtactatcaaggctggtatggttgtcaacttcgctcccgctgctgtcaccactgaagttaagtccgttgaaatgcatcacgaaaccctctctgaaggtctccccggtgacaacgttggtttcaacgtcaagaacgtctccgtcaaggatatccgtcgtggtaacgtctgttccgactccaagaacgatcccgctaaggaatctgcctctttcactgctcaagttattatcttgaaccatcccggtcaaatctctgctggttacgcaccagttctcgattgtcacactgctcacatcgcctgtaagttctctgaactcattgagaagattgatcgtcgttccggtaagtacctgcatctgtcagaattgaaggtccgccgttatagcaaaggctgggtttaaatgttggggtttgtctgatctataatgatgattgctccttcaatttttgacataatttgatgatctgaattgtgttgctaacgtcgcatttgcttcttttgcttcttttgcatgtaggtaagaagatggaagatgctcccaaagtaagtattacgattgatggacaattaaaatagaatactaacaattattgtttatagttcgtcaagtctggtgactctgctatcgtcaagatggttccctccaag

SEQ ID NO: 785 - DNA, 1099 bp, Phialaphora verrucosa ATCC 38561
ggacaagctgaaggccgaacgtgagcgtggtatcaccatcgatatcgcgctctggaagttcgagactcccaaatacttcgtcaccgtcattgatgcccctggtcatcgtgacttcatcaagaacatgatcactggtacctcccaggctgattgtgccatcctcatcattgccgccggtaccggtgagttcgaagccggtatctccaaggatggccagacccgtgagcacgctctcctcgcctacaccctaggtgtgaagcagcttatcgtcgccatcaacaagatggacaccgccaaatggtccgaggatcggttcaacgaaatcatcaaggagacttccaacttcatcaagaaggtcggatacaaccccaagtccgtcccgttcgtgcccatctccggtttcaacggtgacaacatgatcgacgtctcctccaacgccccctggtacaagggttgggagaaggagaccaaggccggcaaggccactggcaagaccctcctcgaggccatcgacgcgattgaccctcctactcgtcccaccgacaagcccctccgtctccctctccaggatgtctacaagatctctggtatcggcacggtgcccgttggtcgtgttgagaccggtaccatcaaagccggtatggtcgtcaccttcgctcccgccaacgtcaccactgaagtcaagtccgtcgaaatgcaccacgaacagctcgccgaaggtgttccaggtgacaatgtcggcttcaacgtcaagaacgtctccgtcaaggaggttcgtcgtggaaacgttgccggtgactccaagaatgacccccccaagggtgccgactccttcaacgctcaggtcatcgtcctcaaccaccctggtcaggtcggtgccggctacgccccggtcttggattgccacactgcccacattgcttgcaagttctctgagctcctcgagaagatcgatcgtcgtaccggcaagtccatggaaaacaaccccaagtttatcaagtctggtgatgctgccatcgtgaagatggttcccagcaagcctatgtgcgttgaggccttcaccgactatcctcctcttggtcgtttcgccgtccgtgac

SEQ ID NO: 786 - DNA, 750 bp, Saksenaea vasiformis ATCC 60625
accaccaagtggtctgaggcccgttaccaggagatcatcaaggagacctccggyttcatcaagaaggtcggcttcaaccccaagcacgttcccttcgtgcccatctccggtttcaacggtgacaacatgatcgacgtctccaccaactgcccctggtacaagggttgggagaaggagaccaaggccaaggccaccggcaagaccmtcctcgaggccattgacgccatcgaccccccyagycgtcccaccgacaagcccctycgtcttcccctmcaggatgtytacaagattggcggtattggcacggttcccgtcggtcgtgtygagaccggtrccatcaagggtggcatggtcgtcaccttcccccccgctggtgtcaccactgaggtcaagtccgtcgagatgcaccacgagcagctcgccgagggtstccccggtgacaacgtcggcttcaacgtcaagaacgtctccgtcaaggagatccgtcgtggcaacgttgccggtgactccaagaacgacccccccaagggctgcgacagcttcaacgcccaggtcatcgtcctcaaccaccccggtcaggtcggcgccggctacgcgccsgtcctsgactgccacactgctcacattgcctgcaagttctctgagctcctcgagaagatcgaccgccgttccggcaagtccatcgagtccggccccaagttcatcaagtctggtgacgccgccatcgtcaagatggttccctccaagccc

SEQ ID NO: 787 - DNA, 1084 bp, Syncephalastrum racemosum ATCC 32330
gctcaaggccgagcgtgagcgtggtatcaccatcgatatcgctctctggaagttcgagacccccaagtaccacgtcaccgtcattgatgcccccggccatcgtgatttcatcaagaacatgatcactggtacctcgcaggctgactgcggtatcctcatcattgccgccggtactggtgagttcgaggctggtatctccaaggatggccagacccgtgagcacgctctgcttgccttcaccctcggtgtccgtcagctgatcgtcgccatcaacaagatggactcgaccaagtactctgaggcccgttacaacgaaatcgtcaaggaggtctccaccttcatcaagaagatcggtttcaaccccaagtccgttcccttcgtccccatctctggctggaacggtgacaacatgttggaggagtcctccaacatgccctggttcaagggctggaagaaggagaccaaggctggcgagaagtccggcaagaccctccttgaggccattgacaacattgaccccccggtccgtccctcggacaagcccctccgtcttcccctccaggatgtctacaagatcggtggtatcggcacagtccccgtcggtcgtgtcgagactggtgtcatcaaggctggtatggtcgtgaccttcgcccccgccaacgtcaccactgaagtcaagtccgtcgagatgcaccacgagcagctcgtcgagggtgtccccggtgacaacgtcggtttcaacgtcaagaacgtttccgtcaaggatatccgccgtggtaacgtctgctctgactccaagaacgaccccgccaaggagtctgcctcgttcaccgcccaggtcatcgtcctgaaccaccccggtcagatcggtgccggttacgccccggttcttgactgccacaccgctcacattgcctgcaagttcgctgagctcctcgagaagatcgaccgtcgttccggyaagaagctcgaagagtcccccaagttcgtcaagtcgggtgactccgccatcgtcaagatggttccctccaagcccatgtgcgttgaggcctacactgagtacccccctcttggccgtttcgcc

SEQ ID NO: 788 - DNA, 1155 bp, Trichophyton tonsurans ATCC 56185
gctcaaggccgagcgtgagcgtggtatcaccatcgatatcgccctctggaagttcgagacccccaagtacaatgtcaccgtcattggtatgtttttctttacctttcccctccatcgtcttgctgtgccataactaacgagagtagacgcccccggtcaccgtgacttcatcaagaacatgatcactggtacctcccaggctgactgtgctattctcatcattgctgccggtactggtgagttcgaggctggtatctccaaggatggccagacccgtgagcacgctctgctcgccttcacccttggtgtcaagcagctcatcgttgccatcaacaagatggacaccaccaactggtccgaggaccgtttcaaggaaatcatcaaggaagtcaccaacttcatcaagaaggttggctacgaccccaagggtgttccattcgttccaatctctggtttcaacggtgacaacatgattgaggcctccagcaactgcccatggtacaagggatggaacaaggagaccaaggccggtggtgccaagactggcaagaccctyctcgaggccatcgatgccatcgacatgccaacccgtcctaccgacaagcccctycgtctcccactccaggatgtctacaagatctctggtatcggaactgtaccagtcggtcgtgttgagaccggtatcatcaagcctggtatggtcgtcaccttcgcccctgccaacgtcaccactgaagtcaagtccgtcgaaatgcaccaccagcagcttcagcagggtgtccccggtgacaacgtcggcttcaacgtcaagaacgtttccgtcaaggaagtccgccgtggtaacgttgccggtgactccaagaacgacccaccatccggctgtgcctccttcaacgcccaggtcatcgtcctcaaccaccccggccagatcggtgctggttacgccccagtcctcgactgccacactgctcacattgcttgcaagttcgctgagctcctcgagaagattgaccgccgtaccggtaaatccgtcgaagccaaccccaagttcgtcaagtctggtgatgccgctatcgccaagatggttccctccaagcccatgtgcgttgaggctttcactgactaccccccacttggtcgtttcgccgtccgtga

SEQ ID NO: 789 - DNA, 1138 bp, Trichophyton mentagrophytes ATCC 8125
tcaaggccgagcgtgagcgtggtatcaccatcgatatcgccctctggaagttcgagacccccaagtacaatgtcaccgtcattggtatgtttctctttacctttcccctccatcgtcttgctgtgccataactaacgagagtagacgcccccggtcaccgtgacttcatcaagaacatgatcactggtacctcccaggctgactgtgctattctcatcattgctgccggtactggtgagttcgaggctggtatctccaaggatggccagacccgtgagcacgctctgctcgccttcacccttggtgtcaagcagctcatcgttgccatcaacaagatggacaccaccaactggtccgaggaccgtttcaaggaaatcatcaaggaagtcaccaacttcatcaagaaggttggctacgaccccaagggtgttccattcgttccaatctctggtttcaacggtgacaacatgattgaggcctccaccaactgcccatggtacaagggatggaacaaggagaccaaggccggtggtgccaagactggcaagaccctcctcgaggccatcgatgccatcgacatgccaacccgtcctaccgacaagcccctccgtctcccactccaggatgtctacaagatctctggtatcggaactgtaccagtcggtcgtgttgagaccggtatcatcaagcccggtatggtcgtcaccttcgcccctgccaacgtcaccactgaagtcaagtccgtcgaaatgcaccaccagcagcttcagcagggtgtccccggtgacaacgtcggcttcaacgtcaagaacgtttccgtcaaggaagtccgccgtggtaacgttgccggtgactccaagaacgacccaccatccggctgtgcctccttcaacgcccaggtcatcgtcctcaaccaccccggccagatcggtgctggttacgccccagtcctcgactgccacactgctcacattgcttgcaagttcgctgagctcctcgagaagattgaccgccgtaccggtaaatccgtcgaagccaaccccaagttcgtcaagtctggtgatgccgctatcgccaagatggttccatccaagcctatgtgcgttgaggctttcactgactaccccccacttggtcg

SEQ ID NO: 790 - DNA, 748 bp, Bipolaris hawaiiensis ATCC 26067
caccaccaagtggtctgaggagcgttaccaggaaatcatcaaggagacctccaacttcatcaagaaggtcggctacaaccccaagcacgttcccttcgtccccatctctggtttcaacggagacaacatgattgaggcttccaccaactgcccctggtacaagggttgggagaaggagaccaaggccaaggccactggtaagacccttctcgaggccatcgacgccatcgacccccctgtccgtcctaccgacaagcccctccgccttcccctccaggatgtgtacaagattggtggtattggcacggttcccgtcggtcgtgtcgagaccggtatcatcaagcccggtatggtcgtcaccttcgcccccgctggtgtcaccactgaagtcaagtccgtcgagatgcaccacgagcagcttgccgagggtgtccccggtgacaacgtcggcttcaacgtcaagaacgtctccgtcaaggagatccgtcgtggtaacgttgccggtgactccaagaacgacccccccaagggttgcgagtccttcaacgcccaggtcatcgtcctcaaccaccccggtcaggtcggtgccggttacgcaccagtccttgactgccacactgcccacattgcttgcaagttctccgagctcctcgagaagattgaccgccgtaccggaaagtctgttgagaactcccccaagttcatcaagtccggtgacgccgccatcgtcaagatggttccctccaag

SEQ ID NO: 791 - DNA, 958 bp, Aspergillus fumigatus ATCC 14110
cgctattgtcgttgttgctgcctccgacggtcagatgtaggtggaacatcttgggaaatacgtcgtaaaacacggcgcttacgttttcgcgaataggccccagactcgtgagcatttgctgctcgcccgccaggttggtgtccagaagatcgttgtcttcgtcaacaaaatcgatgctattgatgatccggagatgctggaactggtcgaactcgagatgcgtgagctgctgaacagctacggtttcgagggtgaagagactccgatcattttcggttccgctctctgtgctctcgaaggacgccgtgacgacatcggtaaagacagaattgagcagcttatgaacgctgtcgacacctggatccccactcctcagcgtgacctcgacaaacctttcttgatgtctgtcgaggaagtgttctctatcgccggccgtggtaccgtggcttctggtcgtgtcgagcgtggtatcttgaagaaggactctgaggttgagattgttggaggctccttcgaacccaagaagaccaaagtcaccgacattgaaaccttcaagaagagctgtgatgaatcgcgtgctggtgacaactctggtctcctcctgcgtggtatccgacgtgaagacgtcaagcgtggtatggtcattgctgttcccggcagcaccaaagctcacgacaagttcctcgtctccatgtacgtcctgaccgaggcggagggtggtcgtcgtactggcttcggtgccaactaccgtccccaagtcttcatccgtactgcaggtaagttcccgcacaccgtgtccagatcttccgagagattagcgatatatgctaatgattcatcagacgaggctgctgacctcagcttccctgacggcgaccaatctcgcagagttatgcctggtgacaacgtcgagatgatcctgaagacccaccaccctgttgctgctgaggctggtcaa

SEQ ID NO: 792 - DNA, 936 bp, Trichophyton mentagrophytes ATCC 8125
cgttgtcgcagcttctgacggtcaaatgtaattgaatgcccgcccagacggatgaaaggatttgacgtttctaacatcattctaggcctcagaccagagaacatttgctccttgcccgccaggtcggtgtccagaagctggtcgttttcgttaacaaggtcgatgccgttgaggacccagagatgttggagcttgtcgaacttgaaatgcgtgaactcctcagccactacggtttcgagggtgaggagacccccatcatttttggctctgctctctgtgccctcgagtcccgtcgacctgagcttggtgtcgagaagattgacgagctattgaacgccgtcgacacctggatccccacccccgagcgcgccactgataagcctttcctcatgtccattgaggaagtgttctctatctctggtcgtggtaccgtcgtctccggtcgtgttgagcgtggtatcctcaagaaggattccgacgtcgaaattgttggtggctctaccacccctatcaagaccaaggtcacagatatcgaaaccttcaagaagtcctgcgatgaatctcgagctggtgacaactctggtctccttctccgaggtatcaagcgtgaggacttgaagcgtggaatggttgttgctgcccccggatccaccaaggctcacaccgacttcatggtctccctctacgtcctgactgaggctgagggtggtcgttccaacggcttcacccacaagtaccgcccccaaatgttcatccgtactgctggtatgtaacccaagtttccgctatttactaagtagatcattgctaacttgtatttccttccgtagacgaagccgcatctttcagctggcctggagaagaccaagacaagaaggctatgcctggtgacaacgtcgagatgatttgcaagaccctccaccccattgctgccga

SEQ ID NO: 793 - DNA, 20 bp, Artificial Sequence
  Synthetic DNA Sequence
ttattgttgctgctggtact

SEQ ID NO: 794 - DNA, 20 bp, Artificial Sequence
  Synthetic DNA Sequence
gacgacaagtcggtgaactt

SEQ ID NO: 795 - DNA, 20 bp, Artificial Sequence
  Synthetic DNA Sequence
acttgcacgcgatgtggcag

SEQ ID NO: 796 - DNA, 21 bp, Artificial Sequence
  Synthetic DNA Sequence
ggtccaatgccwcaaacwaga

SEQ ID NO: 797 - DNA, 27 bp, Artificial Sequence
  Synthetic DNA Sequence
cattaagaatggyttatctgtskctct

SEQ ID NO: 798 - DNA, 22 bp, Artificial Sequence
  Synthetic DNA Sequence
tggttgtcccagccgatcgttt

SEQ ID NO: 799 - DNA, 21 bp, Artificial Sequence
  Synthetic DNA Sequence
acctgtgaatacaagcaatct

SEQ ID NO: 800 - DNA, 24 bp, Artificial Sequence
  Synthetic DNA Sequence
gatgaaatcttcaacgaagttgat

SEQ ID NO: 801 - DNA, 20 bp, Artificial Sequence
  Synthetic DNA Sequence
acaacaccgagaagatccca

SEQ ID NO: 802 - DNA, 20 bp, Artificial Sequence
  Synthetic DNA Sequence
ttgccatttctggtttcgtt

SEQ ID NO: 803 - DNA, 20 bp, Artificial Sequence
  Synthetic DNA Sequence
acttcagtggtaacaccagc

SEQ ID NO: 804 - DNA, 20 bp, Artificial Sequence
  Synthetic DNA Sequence
cctgggacggcctctggcat

SEQ ID NO: 805 - DNA, 20 bp, Artificial Sequence
  Synthetic DNA Sequence
ctcttgtccatcttagcagt

SEQ ID NO: 806 - DNA, 21 bp, Artificial Sequence
  Synthetic DNA Sequence
agcatcaccagacttgataag

SEQ ID NO: 807 - DNA, 20 bp, Artificial Sequence
  Synthetic DNA Sequence
aaagtggcttcaaaggttgc

SEQ ID NO: 808 - DNA, 24 bp, Artificial Sequence
  Synthetic DNA Sequence
  modified_base (3): i
  modified_base (7): i
gcnttanwrgcattagaaraycca

SEQ ID NO: 809 - DNA, 24 bp, Artificial Sequence
  Synthetic DNA Sequence
tcttcctgtwgcaactgttcctct

SEQ ID NO: 810 - DNA, 24 bp, Artificial Sequence
  Synthetic DNA Sequence
agagmwacagataarscattctta

SEQ ID NO: 811 - DNA, 25 bp, Artificial Sequence
  Synthetic DNA Sequence
traartagaattgtggtctrtatcc

SEQ ID NO: 812 - DNA, 26 bp, Artificial Sequence
  Synthetic DNA Sequence
  modified_base (3): i
  modified_base (6): i
  modified_base (9): i
  modified_base (21): i
  modified_base (24): i
gtnacnggntcytyrarrttnccncc

SEQ ID NO: 813 - DNA, 22 bp, Artificial Sequence
  Synthetic DNA Sequence
aatcygtygaaatgcaycacga

SEQ ID NO: 814 - DNA, 20 bp, Artificial Sequence
  Synthetic DNA Sequence
  modified_base (3): i
  modified_base (15): i
gcnggcacgtacacngcctg

SEQ ID NO: 815 - DNA, 20 bp, Artificial Sequence
  Synthetic DNA Sequence
tggtgcatytckacrgactt

SEQ ID NO: 816 - DNA, 20 bp, Artificial Sequence
  Synthetic DNA Sequence
gctacgacgagatcaagggc

SEQ ID NO: 817 - DNA, 20 bp, Artificial Sequence
  Synthetic DNA Sequence
tggaagaaggccgaggagtt

SEQ ID NO: 818 - DNA, 20 bp, Artificial Sequence
  Synthetic DNA Sequence
agccgggctggatcttcttc

SEQ ID NO: 819 - DNA, 20 bp, Artificial Sequence
  Synthetic DNA Sequence
tcgagcttctggaggaagag

SEQ ID NO: 820 - DNA, 21 bp, Artificial Sequence
  Synthetic DNA Sequence
gaaggaggtgtctgcttacac

SEQ ID NO: 821 - DNA, 21 bp, Artificial Sequence
  Synthetic DNA Sequence
ggcgcaaacgtcaccacatca

SEQ ID NO: 822 - DNA, 21 bp, Artificial Sequence
  Synthetic DNA Sequence
cggcggatgtccttaacagaa

SEQ ID NO: 823 - DNA, 20 bp, Artificial Sequence
  Synthetic DNA Sequence
gagcggtatgaygagattgt

SEQ ID NO: 824 - DNA, 20 bp, Artificial Sequence
  Synthetic DNA Sequence
ggcttctgcggcaccatgcg

SEQ ID NO: 825 - DNA, 26 bp, Artificial Sequence
  Synthetic DNA Sequence
atgagcarcgsaaccatcgttcagtg

SEQ ID NO: 826 - DNA, 26 bp, Artificial Sequence
  Synthetic DNA Sequence
tcgatcgtgccgaccatgtagaacgc

SEQ ID NO: 827 - DNA, 446 bp, Clostridium novyi ATCC 19402
caccaacttgctaaatggggagatgcccagattgttgtatatataggctgtggagaacgtggaaatgaaatgacagatgttcttaatgagtttccagaacttaaagatcctaagactggcaaatcaataatggaaagaacagttttaatagcaaatacttctaatatgccagttgcagcccgtgaagcttgtatatatacaggaatcacaatagcagaatattttagagatatgggatattcagtagcacttatggcggattccacttcacgttgggcagaggcattaagagaaatgtctggaagacttgaagaaatgcctggtgatgaaggttacccagcttatttaggatcaagacttgctgatttctatgaaagagctggaaaagttgtgtgtttaggagacgatgaaagagaaggtgccattactgcaataggtgctgtatc

SEQ ID NO: 828 - DNA, 445 bp, Clostridium difficile ATCC 9689
cagcatcagcttgctaaatgggcagatgcagatatagttgtatatataggctgtggcgagcgtggaaatgaaatgacagatgttcttcttgaatttcctgaattaaaagacccaagaacaggcgagtcacttatgcaaagaactgtgcttatagcaaatacatcagatatgccggttgctgcacgtgaagcttctatatacactggtattacaatagctgaatattttagagatatgggatatagtgttgcacttatggcagactctacatcaagatgggctgaggctcttagagagatgagtggtcgtttagaggagatgcctggtgaagaaggttatcctgcatacttaggttcacgtcttgctcaattctatgagagagcaggaaaggtaaattgtctaggtatggatgaaagagaaggaacacttacagcaattggtgcag

SEQ ID NO: 829 - DNA, 445 bp, Clostridium septicum ATCC 12464
atgctatagctaaatggggagacagcgaaatagttgtttacgttggatgtggagaacgtggtaacgaaatgacagacgttcttaacgaattcccagaacttattgacccaaaaactggggaaagtttaatgaagagaacagtacttatagctaatacttcaaacatgccagttgctgctagagaagcttgcatatacacaggtattacaatagctgaatacttcagagatatgggatactcagtatctataatggctgattcaacttcaagatgggcagaagcattaagagaaatgtcaggtagacttgaagaaatgccaggtgatgaaggatatccagcgtacttaggatcaagacttgctgattattacgaaagagcaggtaaggttgtttgtctaggtaaagatggtagagaaggtgctgtaacagcaattggagctgtatc

SEQ ID NO: 830 - DNA, 444 bp, Clostridium botulinum strain 20:3.1
tcaaattgctaaatggggagatgcagaaatcgttgtttacgttggatgcggagaacgtggtaacgaaatgacagacgttgttaatgagttcccagaacttattgaccctaagactggcgaaagcttaatgaagagaacagttcttatagctaatacttcaaacatgccagttgcagcgagagaagcttcaatatatacaggtatcacaatagctgaatatttcagagatatgggatatgcagtatcaataatggctgactcaacttcaagatgggctgaggcattaagagaaatgtctggtagacttgaagaaatgcctggtgatgaaggatatccagcttaccttggatcaagacttgctgattactatgaaagagctggtaaggttgaatgtttaggtaatgatggaagaattggttctataacagcaatcggtgcggtatc

SEQ ID NO: 831 - DNA, 456 bp, Clostridium perfringens ATCC 13124
tagttcagcaccaagttgctaaatggggagatactgagatagttgtttacgttggatgtggagaacgtggtaacgagatgacagacgttcttaacgaattcccagaacttaaagaccctaaaactggggaaagcttaatgaagagaacagttcttattgctaatacatctaacatgccagttgctgccagagaagcatcaatatatactggtataacaatagcagagtatttcagagatatgggatactcagtatcaatcatggctgactcaacttcacgttgggcagaggctttaagagaaatgtcaggaagacttgaagaaatgccaggagacgaaggttacccagcatacttaggatcaagacttgctgattactatgaaagagctggtaaagttgtagctttaggtaaagatggaagagaaggagctgttacagctatcggagcagtatccc

SEQ ID NO: 832 - DNA, 444 bp, Clostridium tetani ATCC 19406
ccaacttgcaaaatgggctgatgctcaaatagttgtgtacataggatgtggagaacgtggaaatgaaatgacagacgttttaaatgagttcccagaattaaaggatcctaaaaccggggaatctttaatgaaaagaactgtgttaatagcaaatacatctaatatgcctgttgcagctagagaagcatctatatatactggtataacaataggggaatattttagagatatgggatattcaatagcactaatggcagattcgacttctagatgggcagaggctctaagagaaatgtctggaagactagaggagatgccaggtgaagaaggttatccagcttatttaggatctagattagcagagttctatgaaagagcaggtaatgttatatgtttaggtcaggatggaagagaaggagcattaacagctataggagcagtttc

SEQ ID NO: 833 - DNA, 1786 bp, Streptococcus pyogenes
tgaaccaaggaaaaataataaccgtttcgggacctcttgttgtggcttctgggatgcaagaagctaatattcaagatatttgtcgtgtgggacatcttggcttagtcggagaaattattgaaatgcgtcgcgatcaagcgtctattcaggtttatgaggaaacatcagggatcggtccaggagaaccagtagtgactactggttgtcctttgtcggtcgagttaggcccgggcctgatttcagaaatgtttgacggtattcagcgaccgcttgatcgttttcaaaaagcaacggacagcgactttttaatccgtggtgtggctatcccaagtcttgatcgaaaggctaagtgggcatttattcccaagctaagtgttggtcaagaagtagttgcaggtgatattttaggaactgtgcaagaaacagctgtcattgagcaccgtatcatggttccttataaagtttcagggaccttggtggctattcatgcaggggacttcacagtaacagatacagtttatgaaattaagcaggaagacggttccatttaccaaggtagcctcatgcagacttggccagttcgtcaaagtcgccctgttgctcaaaagcttatcccagtcgaacctttggttacaggtcaacgggttattgacacctttttccctgttacaaaaggtggtgccgctgccgttcctggaccatttggggcaggaaaaacagttgtgcagcatcaaatagctaaatttgccaacgttgatattgttatttatgtcggttgtggggaacgcggcaacgagatgaccgacgttttgaatgagtttccagagttaattgacccaaatacaggccagtccattatggagcgcacggtgttaattgcaaacacctctaatatgccagtagcagcgcgtgaagcgtcgatttacacaggtattaccattgccgaatatttccgtgatatgggctattctgtggctatcatggcagactcgacatcacgttgggcagaagctctgcgcgagatgtcaggacgcctacaagaaatgcctggtgatgaaggctacccggcttacttagggagtcgtattgccgaatattatgaacgggctggtcgtgttcggaccttgggaagtcaagaacgtgagggaaccattacagccatcggcgcggtttctcctcctggaggggatatttcagagcctgtcactcaaaacacccttcggattgtcaaagttttctgggggctcgacgcgcctcttgcgcaacggcgtcacttcccagcgattaactggctgacgtcttattcattgtatcaagatgatgtaggaagctatattgaccgtaaacagcaatctaattggtccaacaaggtaactcgtgccatggctattttgcagcgtgaagccagtctagaagaaattgtacgcttggtggggcttgattcactgtctgaacaagatcgtttgaccatggctgttgcccggcaaattcgggaggattatctccagcaaaatgcctttgattcggtggatacctttacttcctttccgaaacaagaggccatgctaaccaatattttgacctttaatgaggaagccagcaaagccctttctttgggagcttattttaatgagattatggaaggcactgctcaggtacgcgatcgcatcgcacgcagcaaatttatcccagaagaaaacttagagcagattaaagggcttactcagaaggttaccaaagagattcaccacgttttagcaaagggaggaatttagatgagcgttct

SEQ ID NO: 834 - DNA, 499 bp, Babesia bovis strain Suarez-3
tatctcacgtaagtttttgcgcggcggttatatatcactccaggccctggctaagtacgctaatactgacgttactgtctatgtgggatgtggagagcgtggaaacgagattgcggaggtgcttaaggagttccctgagctgaagaccaaggttgatggcaaggaagtgagcattatgaaacgcacttgcttggtggccaatacttcaaacatgccagtggccgccagggaggctagtatctacactggcattaccctatgtgaatacttcagggatatgggatacaacgcctgtgtgatggcggattccaccagtcgttgggctgaggctttgcgtgagatatcaggtcgtttagctgagatgcctgctgattcaggttatcccgcctaccttgcttctaggctttcggcgttctatgagcgtgctggtacagctgagtgtattggaacaccacttcgtgaaggttcagttaccattgttggtgctgtatctccacca

SEQ ID NO: 835 - DNA, 464 bp, Cryptosporidium parvum
tttctcaagctttgagtaaatatagtaactctgatgttattatttacattggttgtggagaaagaggaaatgaaatggcagaagttcttacagaattccctgagctttatactatggttgatggaaagaaggagtcaattatgcaaagaacttgtttagtagctaatacatcaaatatgcctgtcgctgctagagaagcttccatctacactggtattacactttctgaatactttagagatatgggatgtaatgtttctatgatggcagattcaacttctcgttgggctgaagctcttagagaaatttctggtagattagctgaaatgcctgcagattcgggttacccagcatatttaggcgccagacttgcttcattctatgaaagatcaggaagagttaaatgtatgggttccccagatagagaaggtacagtaacaattgttggtgcagtttctccacct

SEQ ID NO: 836 - DNA, 446 bp, Leishmania infantum strain MOU
gccctctccaagtactccaactccgattgcgtcatctatgtcggctgcggcgagcgcggtaatgagatggccgaggtgctcatggagttcccgaccctgacgaccgtgatcgatggccgcgaggagtcgatcatgaagcgcacctgcctcgtggcgaacacctcgaacatgccagtcgcagcccgtgaggcctctatttacaccggcatcaccctggccgagtactaccgtgatatgggcaagcatatcgccatgatggctgactcgacgtctcgctgggccgaggcgcttcgtgagatttcgggtcgtctggcggagatgccggcggatggtggctaccccgcctacctcagcgctcgtctcgcctccttctacgagcgcgccggcctcgtcacctgcatcggcgggccgaagcgccagggctccgtcacgatcgtcggtgccgt

SEQ ID NO: 837 - DNA, 456 bp, Leishmania major ATCC 50122
ttagtcaggccctctccaagtactccaactccgactgcgtcatctatgtcggctgcggcgagcgcggtaatgagatggctgaggtgctcatggatttcccaactctgacgaccgtgatcgatggtcgcgaggagtccatcatgaagcgcacctgcctcgtggcaaacacttcgaacatgccagtcgcagcccgcgaggcctctatttacaccggcatcaccctggccgagtactaccgtgatatgggcaagcatattgccatgatggccgactcgacatctcgctgggccgaggcgcttcgtgagatttccggtcgtctggcggagatgccagccgatggtggctaccctgcctacctcagcgctcgtctcgcctccttctacgagcgcgccggcctcgtcacctgcatcggcgggccgaagcgccagggctccgtcacgatcgtcggtgctgtgt

SEQ ID NO: 838 - DNA, 450 bp, Leishmania tarentolae strain MOU-2
aggccctctccaagtactccaactccgactgcgtcatctacgtcggctgcggcgagcgcggtaatgagatggccgaggtgctcatggagttcccgaccctgacgactgtgattgatggccgtgaggagtcgatcatgaagcggacctgcctcgtggccaacacctccaacatgccagtcgcagcccgtgaagcctctatttacactggtatcaccctggccgaatactaccgtgatatgggcaagcatatcgccatgatggctgactcgacgtctcgctgggcggaggcgcttcgtgagatttcgggtcgcctggcggagatgccggctgatggtgggtaccccgcctaccttagtgctcgtcttgcctccttctacgagcgtgccggcctcgtcacctgcatcggtgggccgaagcgccagggctccgtcacgatcgtcggtgccgtgt

SEQ ID NO: 839 - DNA, 437 bp, Trypanosoma brucei subsp. brucei strain EATRO795
gcactctcgaagtactcgaacagtgacgctgttatttacgtgggttgtggtgagcgtggcaatgagatggcggaggtgctcatggactttcccaccctcaccaccattattgatggacgtgaggagtctatcatgaagcgcacatgcctggtggcaaatacttccaatatgcctgttgctgctcgtgaggcatctatttacactggtatcaccttagctgagtattatcgggatatgggaaaacacatcgccatgatggccgattcaacctcccgctgggctgaggctttgcgtgagatttccggtcgtcttgctgaaatgcctgcagatggaggttatcccgcgtacctcagcgcccgtttggcctccttctacgagcgtgctggccgtgtgacatgcatcggtgggccgaagcgtgaagggtctgtaacaattgt

SEQ ID NO: 840 - DNA, 1052 bp, Trypanosoma cruzi strain MM3
tgaaggctgagcgcgagcgcggcatcacgatcgacatcgcgctctggaagttcgagtcgcccaagtctgtgttcacgatcatcgacgcccccggccaccgcgacttcatcaagaacatgatcacgggcacgtctcaggcggacgccgccgtccttgtcattgcgtcatcgcagggtgagtttgaggcgggcatctcgaaggacggccagacacgcgagcacgcgctgctcgccttcacgctcggcgtgaagcagatggttgtgtgctgcaacaagatggacgacaagtcggtgaacttcgcccaggagcgctacgatgagattgtgaaggaggtgtcggcgtacctgaagaaggttgggtacaacgtggagaaggtgcgcttcatccccatctccggctggcagggcgacaacatgattgacaagtcggaaaatatgccgtggtacaagggccccacgctgctggaggcactcgacatgctggagcccccggtgcgccccagcgacaagccgctgcgcctgccgctgcaggacgtgtacaagatcggcggtatcggcaccgtgccggtcggtcgcgtggagacgggcacgatgaagcccggcgacgtggtgacgtttgcgcccgccaacgtgacgacggaggtgaagtcgattgagatgcaccacgagcagctggccgaggccacgcccggcgacaacgtcggcttcaacgtgaagaacgtgtccgtgaaggacatccgccgtggcaacgtgtgcggcaactcgaagaacgaccccccaaaggaggcggccgacttcacggcgcaggtgatcatcctgaaccaccccggccagatcggcaacggctatgcgccggtgctcgactgccacacctgccacatcgcgtgcaagttcgccgagatcgagtccaagatcgaccgccgctccggcaaggagcttgagaagaaccccaagtcgatcaagtccggtgacgccgccatggtgcgcatggtgccgcagaagcccatgtgcgtggaggtgttcaacgactacgctcctcttggccgctttgcc

SEQ ID NO: 841 - DNA, 1061 bp, Trypanosoma cruzi strain CGL-1
tgaaggctgagcgcgagcgcggcatcacgatcgacatcgcgctctggaagttcgagtcgcccaagtctgtgttcacgatcatcgacgcccccggccaccgcgacttcatcaagaacatgatcacgggcacgtctcaggcggatgccgccgtccttgtcattgcgtcatcgcagggtgagtttgaggcgggcatctcgaaggacggccagacacgcgagcacgcgctgctcgccttcacgctcggcgtgaagcagatggttgtgtgctgcaacaagatggacgacaagtcggtgaactttgcccaggagcgctacgatgagattgtgaaggaggtgtcggcgtacctgaagaaggttgggtacaacgtggagaaggtgcgcttcatccccatctccggctggcagggcgacaacatgattgacaagtcggaaaatatgccgtggtacaagggccccacgctgctggaggcactcgacatgctggagcccccggtgcgccccagcgacaagccgctgcgcctgccgctgcaggatgtgtacaagatcggcggtatcggcaccgtgccggtcggtcgcgtggagacgggcacgatgaagcccggcgacgtggtgacgtttgcgcccgccaacgtgacgacggaggtgaagtcgattgagatgcaccacgagcagctggccgaggccacgcccggcgacaacgtcggcttcaacgtgaagaacgtgtccgtgaaggacatccgccgtggcaacgtgtgcggcaactcgaagaacgatcccccaaaggaggcggccgacttcacggcgcaggtgatcatcctgaaccaccccggccagatcggcaacggctatgcgccggtgcttgactgccacacctgccacatcgcgtgcaagttcgccgagatcgagtccaagatcgaccgccgctccggcaaggagcttgagaagaaccccaagtcgatcaagtccggtgacgccgccatggtgcgcatggtgccgcagaagcccatgtgcgtggaggtgttcaacgactacgctcctcttggccgctttgccgtgcgtgac

SEQ ID NO: 842 - DNA, 1062 bp, Trypanosoma cruzi strain PCU-1
gctgaaggctgagcgcgagcgcggcatcacgatcgacatcgcgctctggaagttcgagtcgcccaagtctgtgttcacgatcatcgacgcccccggccaccgcgacttcatcaagaacatgatcacgggcacgtctcaggcggacgccgccgtccttgtcattgcgtcatcgcagggtgagtttgaggcgggcatctcgaaggacggccagacacgcgagcacgcgctgctcgccttcacgctcggcgtgaagcagatggttgtgtgctgcaacaagatggacgacaagtcggtgaacttcgcccaggagcgctacgatgagattgtgaaggaggtgtcggcgtacctgaagaaggttgggtacaacgtggagaaggtgcgcttcatccccatctccggctggcagggcgacaacatgattgacaagtcggaaaatatgccgtggtacaagggccccacgctgctggaggcactcgacatgctggagcccccggtgcgccccagcgacaagccgctgcgcctgccgctgcaggacgtgtacaagatcggcggtatcggcaccgtgccggtcggtcgcgtggagacgggcacgatgaagcccggcgacgtggtgacgtttgcgcccgccaacgtgacgacggaggtgaagtcgattgagatgcaccacgagcagctggccgaggccacgcccggcgacaacgtcggcttcaacgtgaagaacgtgtccgtgaaggacatccgccgtggcaacgtgtgcggcaactcgaagaacgaccccccaaaggaggcggccgacttcacggcgcaggtgatcatcctgaaccaccccggccagatcggcaacggctatgcgccggtgctcgactgccacacctgccacatcgcgtgcaagttcgccgagatcgagtccaagatcgaccgccgctccggcaaggagcttgagaagaaccccaagtcgatcaagtccggtgacgccgccatggtgcgcatggtgccgcagaagcccatgtgcgtggaggtgttcaacgactacgctcctcttggccgctttgccgtgcgtga

SEQ ID NO: 843 - DNA, 1057 bp, Babesia bovis strain Suarez-3
tacattgacagctgcattgaccaaggtctgttcgatgggtggtcatggcgagtacactccttatgaagcaattgaccgtgctcctgaggagcgtaaacgtggtattactataaattcgacacatgttgaatatgagactaagaaccgtcattacggtcacgtggactgtccaggtcactctgattatgtgaagaacatgatatctggcgctgctcagatggatggtgccatattggttgtttcttgtgttgacggtcccatgcctcagactaaggagcacgtgttgcttgctaagcagattggtgtacctcgtttagttgtgtttttgaacaagcttgacatgttagaggactctgagctattggagttggtggagttagaggttcgtgagttattgagtgagtttggttacgacggtgacaacacgcctatcgttcgtggcagtgctataaaggcattgaacagtagttccgaggctgacattaagccaattcaggatttattggatgcgtgtgatgcctttttactgactccagaacgtaaggatgacatgccgctcttggttgctattgacgatgttcttgccattcctggcaagggtactgttgtaaccggtaggatagagcagggcaagattcgttgtggtgaccctattgaggtttgcgccggtccgaagtccggcaagaagactgtgtgtgttggtcttraratgttccgcaagagtctcagtragggtattgctggtgaccagattggtgttttgctcaagggtgtgaagcgcgacraggtagagcgcgggtttgtattgattcaacccggaagttacaaatgtcacggtgaatttgatgctgacttgtacgtgttgactacgraggaaggtgggcgcaagcatccgtttgtgtctaactaccgtcctcaggcgtttatacgtactggagacgtttgctgctcagttcatttggatragggtgttgagatggcagctcctggtgacaacgtgcgttgcaagatcaagttactttatcccatgcctgtccatgaaggtttacgatttgcg

SEQ ID NO: 844 - DNA, 943 bp, Leishmania aethiopica ATCC 50119
cggtggcatcattgtggtggcggccaccgacggcgtcatgccgcagacacgcgagcacctcctgatctgctcgcagattgggcttccggcgctcgtagggttcatcaacaaagtggatatgacggacgaggacacgtgcgacctggtggacatggaggtgcgcgagcagctggagaaatacaagtttccggcggaggagacaccaatcgtgcgcggctcggccctcaaggccgtcgagggcgacgcgaagtacgaggagaacatcctcgaactggtgcggaagtgcgacgagtggatccccgacccgccgcgcaacacagacaagcctttccttatggccatcgagcacgtttacgagatcggcaaggacaagaagagcgtcatcgtgaccggccgcgtcgatcagggcgtgctgaagctcaacacagacgccgagctggccggcttcagcgccaagaagtcgacggtgagggtgacgggcatcgagatgtaccacaagacgctgagcgagtgcatgcccggtgactccgtcggcgtcagcattgtcggcaccggcgacacaaccagtctgtccaaggacaacgtggaacgcggcatggtaatggcggcgacgggtagcacgaacctgtacaacaaggtgaaggcgcaggtgtacgtgctgacgaaggatgagggcggccgccacaccggcttcagcccccactaccgcccgcagctcttcttccattgcgctgacgtgacagcggacatgagcttcccggaggcggagaagcaccgggaggagctgaacaagaaattcggccgcggccccgaggaggacaagaagaaagaggcggagatgaaggagttcgagagcaagctcgtctgcatgccgggcgataaccgcgagctgatcctgacgctcgcgtacccgatgcccattgaaaagggcctgaagttcacc

SEQ ID NO: 845 - DNA, 939 bp, Leishmania amazonensis ATCC 50131
cggtggcatcattgtggtggcggccaccgacggcgtcatgccgcagacacgcgagcatctcttgatctgctcgcagattgggcttccggcgctcgtagggttcatcaacaaagtggacatgacggacgaggacacgtgcgacctggtggacatggaggtgcgtgagcagctggagaaatacaagtttccggcggaagagacgcccatcgtgcgcggctcggccctcaaagccgtcgagggcgacgcgaagtacgaggagaacatcctcgaactggtgcggaagtgcgacgaatggatccccgacccgccgcgcaacacagacaagcctttccttatggccattgagcacgtttacgagatcggcaaggacaagaagagcgtcatcgtgaccggccgcgtcgatcagggcgtgctgaagctcaacacagacgccgagctggccggcttcagcgccaagaagtcgacggtgagggtgacgggcatcgagatgtaccacaagacgctgagtgagtgcatgcccggtgactccgtcggcgtcagcattgtcggcaccggcgacacgatcagtctctccaaggacaacgttgaacgcggcatggtaatggcggcaacgggtagcacgaacctgtacaacaaggtgaaggcgcaggtgtacgtgctgacgaaggatgagggcggccgccacactggcttcagcccccactaccgcccgcagctcttcttccattgtgctgacgtgacggcggacatgagcttcccggaggcggagaagcaccgcgaggagctcaacaagaaattcggccgcggccccgaggaggacaagcagaaggaggcggagatgaaagagttcgagagcaagctcgtctgcatgccgggcgacaaccgcgagctgatcctgacgctggcgtacccgatgcccattgacaagggtctgaagtt

SEQ ID NO: 846 - DNA, 945 bp, Leishmania donovani ATCC 50212
cattgtggtggcggccaccgacggcgtcatgccgcagacacgcgagcacctcctgatctgctcgcagatcgggcttccggcgctcgtagggttcatcaacaaggtggacatgacggacgaggacacgtgcgacctggtggacatggagctgcgcgagcagctggagaaatacaagtttccggcggaggagacgccaatcgtgcgcggctcagccctcaaagccgtcgagggcgatgcgaagtacgaggagaacattctcgaactggtgcggaagtgtgacgagtggatccctgacccgccgcgcaacacagacaagcctttccttatggccatcgagcacgtttacgagatcggcaaggacaagaagagcgttgtcgtgaccggccgcgtcgatcagggcattctgaagctcaacacagacgccgagctggccggcttcagctccaagaagtcgacggtgagggtgacgggcatcgagatgtaccacaagacgctgagcgagtgcatgcctggtgactccgtcggcgtcagcattgtcgggaccggcgacacgaccagtctatccaagggcaacgtggaacgcggcatggtgatggcggcgacgggtagcacgaacctgtacaacaaggtgaaggcgcaggtgtacgtgctgacgaaggatgagggcggccgccacactggctttagtcctcactaccgcccgcagctcttcttccattgtgctgacgtgacggcggacatgagcttcccggaggcggagaagcaccgcgaagagctcaacaagaaattcggccgcggccccgaggaggacaagaagaaagaggcagcgatgaaggagttcgagagcaagctcgtctgcatgccgggcgataaccgcgagctgatcctgacgctggcgtacccgatgcccattgaaaagggtctgaagttcaccatccgtgaggg

SEQ ID NO: 847 - DNA, 939 bp, Leishmania infantum strain MOU
ggcatcattgtggtggcggccaccgacggcgtcatgccgcagacacgcgagcacctcctgatctgctcgcagatcgggcttccggcgctcgtagggttcatcaacaaggtggacatgacggacgaggacacgtgcgacctggtggacatggagctgcgcgagcagctggagaaatacaagtttccggcggaggagacgccaatcgtgcgcggctcagccctcaaagccgtcgagggcgatgcgaagtacgaggagaacattctcgaactggtgcggaagtgtgacgagtggatccctgacccgccgcgcaacacagacaagcctttccttatggccatcgagcacgtttacgagatcggcaaggacaagaagagcgttgtcgtgaccggccgcgtcgatcagggcgttctgaagctcaacacagacgccgagctggccggcttcagctccaagaagtcgacggtgagggtgacgggcatcgagatgtaccacaagacgctgagcgagtgcatgcctggtgactccgtcggcgtcagcattgtcggcaccggcgacacgaccagtctatccaagggcaacgtggaacgcggcatggtgatggcggcgacgggtagcacgaacctgtacaacaaggtgaaggcgcaggtgtacgtgctgacgaaggatgagggcggccgccacactggctttagtcctcactaccgcccgcagctcttcttccattgtgctgacgtgacggcggacatgagcttcccggaggcggagaagcaccgcgaagagctcaacaagaaattcggccgcggccccgaggaggacaagaagaaagaggcagcgatgaaggagttcgagagcaagctcgtctgcatgccgggcgataaccgcgagctgatcctgacgctggcgtacccgatgcccattgaaaagggtctgaagttcacc

SEQ ID NO: 848 - DNA, 933 bp, Leishmania enriettii ATCC 50120
caccgacggcgtcatgccgcagacacgggagcacctgctcatctgctcgcagatcgggctgccggcgcttgtagggttcatcaataaagttgacatgacggacgaggatacgtgcgacctcgtggacatggaggtgcgggaacagctggagaagtacaagtttccggccgaggagacgcccatcgtacgtggctcggccctcaaggccctcgagggggatgcgcaatacgaggggagtattctcgagctggtgcgaaagtgcgacgagtggatccccgacccgccgcgcaacaccgaaaagcctttcctcatggctatcgagcacgtttacgagctcggcaaagacaagaagagcgtcatcgttaccggccgcgtcgatcaaggtgtgctgaagctcaacacagacgccgagctggccggcttcagcgccaagaaggcgacagtcaaagtgacgggcatcgagatgtatcacaagacactcaatgagtgcatgcccggcgactctgtcggtgtcagcatcgtcggtaccggtgacacgaccagcttatccaaggataatgttgagcgcggtatggtaatggcggcaacgggtagcacgaacctgtacaacaagctgaaggcgcaggtttacgtgctgacaaaggaggagggtggccgccacaccgggttcagcccccactaccgcccgcagctcttcttccactgcgctgacgtgaccgcagacatgagcttcccggaggcggagaagtaccgcgaggagctcaacaagaagttcggccgtggccctgaggaggacaagaagaaagaggcggagatgaaggagttcgaaagcaaacttgtctgcatgccaggcgataaccgcgagctgatcctaactctggcgtacccgatgcccatcgacaagggcctgaagttcaccatccgtgagggcgg

SEQ ID NO: 849 - DNA, 943 bp, Leishmania gerbilli ATCC 50121
cggtggcatcattgtggtggcggccaccgacggcgtcatgccgcagacacgcgagcacctcctgatctgctcgcagattgggcttccggcgctcgtagggttcatcaacaaagtggacatgacggacgaggacacgtgcgacctggtggacatggaggtgcgcgagcagctggagaaatacaagtttccggcggaggagacaccaatcgtgcgcggctcggccctcaaggccgtcgagggcgacgcgaagtacgaggagaacatcctcgaactggtgcggaagtgcgacgagtggatccccgacccgccgcgcaacacagacaagcctttccttatggccatcgagcacgtttacgagatcggcaaggacaagaagagcgtcatcgtgaccggccgcgtcgatcagggcgtgctgaagctcaacacggacgccgagctggccggcttcagcgccaagaagtcgacggtgagggtgacgggcattgagatgtaccacaagacgctgagcgagtgcatgcccggtgactccgtcggcgtcagcattgtcggcaccggcgacacgaccagtctgtccaaggacaacgtggaacgcggcatggtaatggcggcgacgggtagcacgaacctgtacaacaaggtgaaggcgcaggtgtacgtgctgacgaaggatgagggcggccgccacactggcttcagcccccactaccgcccgcagctcttcttccattgcgctgacgtgacagcggacatgagcttcccggaggcggagaagcaccgcgaggagctcaacaagaaattcggccgcggccccgaggaggacaagaagaaagaggcggagatgaaggagttcgagagcaagctcgtctgcatgccgggcgataaccgcgagctgatcctgacgctggcgtacccgatgcccattgaaaagggtctgaagttcacc

SEQ ID NO: 850 - DNA, 918 bp, Leishmania major ATCC 50122
ggcatcattgtggtggcggccaccgacggcgtcatgccgcagacacgcgaacacctcctgatctgctcgcaaattggccttccggcgctcgtagggttcatcaacaaagtggacatgacggacgaggacacgtgtgacctggtggacatggaggtgcgcgagcagctggagaaatacaagtttccggcggaggagacaccaatcgtgcgcggctcggccctcaaggccgtcgagggcgacgcgaagtacgaggagaacatcctcgaactggtgcggaagtgcgacgagtggatccccgacccgccgcgcaacacagacaagcctttccttatggccatcgagcacgtttacgagatcggcaaggacaagaagagcgtcatcgtgaccggccgcgtcgatcagggcgtgctgaagctcaacacagacgccgagctggccggcttcagcgccaagaagtcgacggtgagggtgacgggcattgaaatgtaccacaagacgctgagcgagtgcatgcccggtgactccgtcggcgtcagcattgtcggcaccggcgacacgaccagtctgtccaaggacaacgtggagcgcggcatggtaatggcggcgacgggtagcacgaacctgtacaacaaggtgaaggcgcaggtgtacgtgctgacgaaggatgagggcggccgccacactggcttcagcccccactaccgcccgcagctcttcttccattgcgctgacgtgacagcggacatgagcttcccggaggcggagaagcaccgcgaggagctcaacaagaaattcggccgcggccccgaggaggacaagaagaaagaggcggagatgaaggagttcgagagcaagctcgtctgcatgccgggcgataaccgcgagctgatcctgacgctggcgtacccgatgcccatt

SEQ ID NO: 851 - DNA, 939 bp, Leishmania mexicana ATCC 50156
cggtggcatcattgtggtggcggccaccgacggcgtcatgccgcagacacgcgagcatctcctgatctgctcgcagattgggcttccggcgctcgtagggttcatcaacaaagtggacatgacggacgaggacacgtgcgacctggtggacatggaggtgcgtgagcagctggagaaatacaagtttccggcggaagagacgcccatcgtgcgcggctcggccctcaaggccgtcgagggcgacgcgaagtacgaggagaacatcctcgaactggtgcggaagtgcgacgaatggatccccgacccgccgcgcaacacagacaagcctttccttatggccattgagcacgtttacgagatcggcaaggacaagaagagcgtcatcgtgaccggccgcgtcgatcagggcgtgctgaagctcaacacagacgccgagctggccggcttcagcgtcaagaagtcgacggtgagggtgacgggcatcgagatgtaccacaagacgctgagtgagtgcatgcccggtgactccgtcggcgtcagcattgtcggcaccggcgacacgatcagtctctccaaggacaacgttgaacgcggcatggtaatggcggcaacgggtagcacgaacctgtacaacaaggtgaaggcgcaggtgtacgtgctgacgaaggatgagggcggccgccacactggcttcagcccccactaccgcccgcagctcttcttccattgtgctgacgtgacggcggacatgagcttcccggaggcggagaagcaccgcgaggagctcaacaagaaattcggccgcggccccgaggaggacaagcagaaggaggcggagatgaaagagttcgagagcaagctcgtctgcatgccgggcgacaaccgcgagctgatcctgacgctggcgtacccgatgcccattgagaagggtctgaagtt

SEQ ID NO: 852 - DNA, 912 bp, Leishmania tarentolae strain MOU-2
tcattgtggtggccgccaccgacggcgtcatgccgcaaacacgggagcaccttttgatctgctcgcagatcgggctgccggcgctcgtagggttcatcaacaaagtggacatgacagacgaagacacgtgcgacctggtagacctggaggtgcgtgagcagctggagaagtacaagtttccggcagaggaaacaccaatcgtgcgtggctcggccctcaaggccgttgagggcgatgcaaagtacgaggagaacatcctcgaactggtgcggaagtgcgacgagtggatcccagacccgccacgcaatacggacaagcctttccttatggccattgaacacgtgtacgagatcggcaaggataggaaaagcgtcatcgtaaccggccgcgtcgatcaaggtgtgctgaagctgaacacagacgccgagctggccggcttcagcgccaagaagtcgacggtgaaagtgacgggcattgagatgtaccacaagacactgacagagtgcatgcccggcgactctgtcggcgtcagcattgtgggcactggygacacgaccagcctctctaaggacaatgttgagcgtggcatggtactggccgctacgggtagcacgaacctgtacaacaaagtaaaggcgcaggtgtatgtactcacgaaggatgagggcggccgccacaccggcttcagcccccactaccgtccgcagctcttcttccactgcgctgacgtaacggcggacatgagcttcccggaggcggagaagcaccgcgaggaactcaataagaaattcggccgcggccccgaggaggacaagaaaaaggaggcggagatgaaggagttcgagagcaagctggtctgcatgccaggcgataaccgcgagctgatcctgacattggcgtacccgatgccta

SEQ ID NO: 853 - DNA, 936 bp, Trypanosoma cruzi strain MM3
attcttgtggtggcagctaacgacggatgcatgccgcagacgcgtgagcacctgcttatttgttcgcagattggccttcctgctcttgtatgctttatcaataagtgtgacatgatgcaagggcaggaggaaatgattgaacttgttgaaatggaggtacgtgaacttttggagaagtacaagttccctgcggaggagacgccatttgtgcgggggtctgcggtgaaggcattggagggtgatgctgaaaatgaaggaaagattttggagcttgtaaaaaaatgtgatgaatggattcccgacccaccgcgtgccattgaaaaaccgttccttatggccattgagcacgtttttgaggttggaaaggataagaaggccgttgttgtgagcgggcgtgtggaccaggggcagttgaaggtcggcgcagatgcagaactttccgggtttagcgcaaagaagctgacggtgaaggttgctagcatcgaaatgtaccataaaattctggaggattgcatgcctggtgactctgttggcgcgaagatcgttggcagcggtgaaacagtgaacctgtcgaaggaaaatgtggaacgcggcatggtactctccgcaccaggtgcaacgacactgttcaacaaggtccgcgcgcaggtgtacgtgttgacaaaggaagaaggcggtcgtcacacagcctttagtcctcactatcgtccgcagcttttcttccactgtgctgatgtcacggcagatattaacttcccggaaagcgagaagcttgcaggggagctgaacaaaaagtatggccgtgatgcggcggaacagaagaagaaggaggcagaactgaaagagtttgaaaagacgcttgtctgcatgcctggtgataaccgcgaactcctgctcacccttgcctatccaatgccaatggaaaagggactcaag

SEQ ID NO: 854 - DNA, 934 bp, Trypanosoma cruzi strain PCU-1
cggcattcttgtggtggcagctaacgacggatgcatgccgcagacgcgtgagcacctgcttatttgttcgcagattggccttcctgctcttgtatgctttatcaataagtgtgacatgatgcaagggcaggaggaaatgattgagcttgttgaaatggaggtacgtgaacttttggagaagtacaagttccctgcggaggagacgccatttgtgcgggggtctgcggtgaaggcattggagggtgatgctgaaaatgaaggaaagattttggagcttgtaaaaaaatgtgatgaatggattcccgacccaccgcgtgccattgaaaaaccgttccttatggccattgagcacgtttttgaggttggaaaggataagaaggccgttgttgtgagcgggcgtgtggaccaggggcagttgaaggtcggcgcagatgcagaactttccgggtttagtgcaaagaagctgacggtgaaggttgctagcatcgaaatgtaccataaaattctggaggattgcatgcctggtgactctattggcgcgaagatcgttggcagcggtgaaacagtgaacctgtcgaaggaaaatgtggaacgcggcatggtactctccgcaccaggtgcaacgacactgttcaacagggtccgcgcgcaggtgtacgtgttgacaaaggaagaaggcggtcgtcacacagcctttagtcctcactatcgtccgcagcttttcttccactgtgctgatgtcacggcggatattaacttcccggaaagcgagaagcttgcaggggagctgaacaaaaagtatggccgtgacgcggcggaacagaagaagaaggaggcagaactgaaagagtttgaaaagacgcttgtctgcatgcctggtgataaccgcgaactcctgctcacccttgcctatccaatgccaatggaaaaggga

SEQ ID NO: 855 - DNA, 937 bp, Trypanosoma cruzi strain CGL-1
tggcggcattcttgtggtggcagctaacgacggatgcatgccgcagacgcgtgagcacctgcttatttgttcgcagattggccttcctgctcttgtatgctttatcaataagtgtgacatgatgcaagggcaggaggaaatgattgaacttgttgaaatggaggtacgtgaacttttggagaagtacaagttccctgcggaggagacgccatttgtgcgggggtctgcggtgaaggcattggagggtgatgctgaaaatgaaggaaagattttggagcttgtaaaaaaatgtgatgaatggattcccgacccaccgcgtgccattgaaaaaccgttccttatggccattgagcacgtttttgaggttggaaaggataagaaggccgttgttgtgagcgggcgtgtggaccaggggcagttgaaggtcggcgcagatgcagaactttccgggtttagcgcaaagaagctgacggtgaaggttgctagcatcgaaatgtaccataaaattctggaggattgcatgcctggtgactctgttggcgcgaagatcgttggcagcggtgaaacagtgaacctgtcgaaggaaaatgtggaacgcggcatggtactctccgcaccaggtgcaacgacactgttcaacaaggtccgcgcgcaggtgtacgtgttgacaaaggaagaaggcggtcgtcacacagcctttagtcctcactatcgtccgcagcttttcttccactgtgctgatgtcacggcagatattaacttcccggaaagcgagaagcttgcaggggagctgaacaaaaagtatggccgtgatgcggcggaacagaagaagaaggaggcagaactgaaagagtttgaaaagacgcttgtctgcatgcctggtgataaccgcgaactcctgctcacccttgcctatccaatgccaatggaaaaggga

SEQ ID NO: 856 - DNA, 888 bp, Babesia bigemina strain Suarez-2
cttattatggagctgatcaacaacgtcgcgaagaagcacggtggtttctccgtgttcgccggcgtcggcgagcgcaccagggagggcaacgagctgtaccacgagatgatggagaccggcgtcatcaagcgccgccagctggatgacggcacgttcgacttctccggctccaaggccgcgctggtgtacggccagatgaacgagccgccaggtgccagggcgcgtgttgccctcactggcctgacggtggccgagtacttccgtgatgaggacggccaggacgtgctgctcttcatcgacaacatctaccgtttcacccaggctggttctgaggtgagtgcccttttggggcgcatcccgtccgccgtcggttaccagccgaccctcgccaccgaccttggcgcgctgcaggagcgtatcacgacgaccaacaagggctccatcacctccgtgcaggccgtctacgtgccggccgacgatatcaccgacccggcgcctgcgaccaccttcacccatctggacgcgaccactgtgctctcccgttccatcgccgagctgggtatctaccccgccgtcgacccgctcgactccacctcgcgtatgctgtccgcgaacatcgtcggcgaggagcagtacaacgtggcgcgtggcgtgcagaaaatactgcaggactacaaatcgctgcaggatatcatcgccatcctgggtatggacgagctgtctgagcaggacaagttcgtcgtcgcgcgtgcgcgcaaggttcagcgtttcctatcccagcccttccaggtggctgaggtattcaccggcaagcccggacgtttcgtcgagctgcaggacaccatcagcggcgtcaaggagattttggacggcgagtgcgacgacatg

SEQ ID NO: 857 - DNA, 884 bp, Babesia bovis strain Suarez-3
tgattatggaattgatcaacaatgtcgccaagaaacacggtgggttctccgtgttcgctggtgttggtgaacgtacgagggaaggtaacgaactgtaccatgaaatgatggaaacgggtgtcatcaagcgccgtcaactggaagacggaacatttgacttctcgggctctaaagctgctttggtgtacggacaaatgaacgaaccaccaggtgctagagcccgtgttgcactcacgggattgaccgttgccgagtatttccgtgatgaagaggggcaggatgtgctactcttcatcgataacatctaccgtttcacccaggccggttccgaagtgagtgcgctgttaggaagaattccatccgccgtgggttatcaacctacattggccactgatctcggagcactccaggaacgcattactacaaccaacaagggttcgattacatcagtccaggcagtatacgtcccagccgatgatatcactgatcccgctccagctaccactttctcgcacttggatgccactacagtgctttctcgttcaattgcggagttgggtatttaccctgcggtcgacccgcttgactcaacgtcacgtatgctgtcggccaacattgtaggacaggaacagtacgatgccgcacgtggtgtacagaaaattttacaggactacaaatcactgcaggatatcattgccattctgggtatggacgagctgtctgagcaggacaagttcgttgtagcacgcgcccgtaaggtacagcgtttcctgtctcagccgttccaagtggctgaggtgttcaccggcaagcctgggaggttcgttgaactacaggataccatcagcggtgtcaaggaaatctggaaggtgagtgtgacgata

SEQ ID NO: 858 - DNA, 871 bp, Babesia microtti strain Persing-1
tggaactgattaataatgtggccaaaaagcatggcggttactctgtttttgcaggtgtaggtgaaaggacgagggagggtaatgaattgtaccatgaaatgatggagacaggtgttataaagaaaaaggcactaggtggtgggaagtttgatttcagtggatctaaagcagcgctggtctatggacaaatgaacgagccacctggggcccgtgctagagtggcactaactggattaacagtcgcagaatatttccgtgacgaacaaggacaagacgtgttgttgtttattgataatatttaccgatttactcaggcagggtctgaggtttcagccttgctaggccgtataccttcagctgtgggataccagcctacattggcaacagatcttggctgtttacaagaacgaattactacgaccaaatctggttcaatcaccagtgtacaagctgtgtatgtgccagcagatgatattactgatccagcgcctgccacaacttttactcacttggacgctactactgtacttagcaggccaattgctgaactcggtatttatccagcggtagacccgttggattcaacaagccgtatgctaagcgcgaacattgtgggaaatgaacactatagtgtagcccgttccgtgcagaagatactgcaagattacaaatcgcttcaggacattattgccattttgggtatggatgaactgtcggaacaagacaaaaatatagtagcccgagcaaggaagatgcaaaggttcttatcacagccattccaagtggcggaagtttttactggtaaaccgggaagatttgtggaattggaagatacaattgccggggcacgagatataattgcgggtaattg

SEQ ID NO: 859 - DNA, 1255 bp, Leishmania guyanensis ATCC 50126
tgacggcgctggacgtgacggaggacctcggccgcgatgagccgctgacgctggagatcgtgcagcacttggatgcgaacaccggccgctgcattgcgatgcagacgacggacctgctgaagctgaagtcgaaggttgtgtcgaccggcggcaacatctccgtgccggtgggccgcgagacactgggccgcatcttcaacgtgctgggcgacgcgattgaccaccgcggccccgtgtgcgagaagatgcgcatggcgatccacgccgaggcgccgaagctggcggaccaggctgcggaggacacgatcctgacgaccggcatcaaggtgatcgacctgattctgccctactgcaagggcggcaagatcggcctgttcggcggtgccggtgtgggcaagactgtgatcatcatggagctgatcaacaacgtcgcgaaggggcacggcggcttctccgtgttcgccggcgttggcgagcgcacgcgcgagggcacggacctgtacctggagatgatgcagtcaaaggtgattgacctgaagggcgagtcgaagtgcgtgcttgtgtacgggcagatgaacgagcccccgggtgcgcgcgcgcgcgttgcgcagtctgcgctgacgatggccgagtacttccgcgacgtggagggccagaacgtgctgctgttcatcgacaacatcttccgcttcacgcaggcgaactccgaggtgtctgcgctgctgggccgcatcccggccgccgtgggttaccagccgacgcttgcggaggatcttggcatgctgcaggagcgcattacgtcgacgacgaagggatcgattacgtctgtgcaggctgtgtacgtgcctgcggatgatatcacggaccccgcgcccgcgacgacgttctcgcacctggacgcgacgactgtgctggaccgcgcggtggcggagtcgggcatctaccctgccgtgaacccgctggagtgcgcgtcgcgcatcatggaccccgatgtgatcgacgtggaccattacaacgttgcacaggatatcgtccagatgctgaccaagtacaaggagctgcaggacatcattgcggtgcttggcatcgacgagctgagcgaggaggacaaggtcgtggtggaccgcgcgcgcaaggtgacgcggttcctgtcgcagccgttccaggttgcggaggtgttcaccggcatgacgggccactacgtgcagctgagcgacacggtggagtcgttctctggcctgctgatggggtcgta

SEQ ID NO: 860 - DNA, 1222 bp, Leishmania mexicana ATCC 50156
ctcggagggcgtcccgcccgtgctgacggcgctggatgtgacggaggaccttggccgcgatgagccgctgacgctggagatcgtgcagcacctggacgcgaacaccggccgctgcattgcgatgcagacgacggacctgctgaagctgaagtcgaaggttgtgtcgaccggcggcaacatctctgtgccggtgggccgtgagacgctgggccgcatcttcaacgtgctgggcgacgcgatcgaccagcgcggccccgtgggtgagaagatgcgcatggcgatccacgccgaggccccgaagctggcggatcaggccgcggaggacacgatcctgacgaccggcatcaaggtgatcgacctgattctgccctactgcaagggtggcaagatcggcctgtttggcggcgccggtgtgggcaagaccgtgatcatcatggagctgattaacaacgtcgcgaagggccacggtggtttctcggtgtttgccggcgttggcgagcgcacgcgcgagggcacggacctgtacctggagatgatgcagtcgaaggtgattgacctgaagggcgagtcgaagtgcgtgcttgtgtacgggcagatgaacgagcccccgggtgcgcgcgcgcgcgttgcgcagtctgcgctgacgatggcggagtacttccgagacgtggagggccagaatgtgctgctgttcatcgacaacatcttccgcttcacgcaggcgaactccgaggtctctgcgctgctgggccgcattccggccgccgtgggctaccagccgacgcttgcggaggatcttggtatgctgcaggagcgcatcacgtcgacgacgaaggggtcgatcacgtccgtgcaggccgtgtacgtgcctgcggatgatatcacggatccggcgcccgcgacgacgttctcgcacctggacgcgacgactgtgctggaccgcgcggtggcggagtcggggatctaccctgccgtgaacccgctggagtgcgcgtcgcgtatcatggaccccgatgtgatcgacgtggaccactacaacgttgcgcaggatatcgtgcagatgctgaccaagtacaaggagctgcaggatatcattgcggtgcttggtatcgacgagctgagcgaggaggacaaggtcgtggtggaccgcgcgcgcaaggtgacccggttcctgtcgcagccgttccaggttgcggaggtgttcacgggcatgacgggccac

SEQ ID NO: 861 - DNA, 1246 bp, Leishmania tropica ATCC 50129
ccgtgctgacggcgctggatgtgacggaggaccttggccgcgatgagccgctgacgctggagatcgtgcagcacttggacgcgaacaccggccgctgcattgcgatgcagacgacggacctgctgaagctgaagtcgaaggttgtgtcgaccggcggcaacatctctgtgccggtgggccgtgagacgctgggccgcatcttcaacgttctgggcgacgcgatcgaccagcgcggccccgtgggcgagaagatgcgcatggcgatccacgccgaggccccgaagctggcggatcaggccgcggaggacacgatcctgacgaccggcatcaaggtgatcgacctgattctgccctactgcaagggtggcaagatcggcctgttcggcggtgccggtgtgggcaagactgtgatcatcatggagctgatcaacaacgtcgcgaagggccacggtggtttctccgtgtttgccggcgttggcgagcgcacgcgcgagggcacggacctgtacctggagatgatgcagtcgaaggtgattgacctgaagggcgagtcgaagtgcgtgcttgtgtacgggcagatgaacgagcccccgggtgcgcgcgcgcgcgttgcgcagtctgcgctgacgatggcggagtacttccgcgacgtggagggccagaacgtgctgctgttcatcgacaacatcttccgcttcacgcaggcgaactccgaggtgtctgcgctgctgggccgcattccggccgccgtgggctaccagccgacgcttgcggaggatcttggtatgctgcaggagcgcatcacgtcgacaacgaaggggtcgatcacgtccgtgcaggccgtgtacgtgccagcggatgatatcacggatcccgcgcccgcgacgacgttctcgcacctggacgcgacgactgtgctggaccgcgcggtggcggagtcgggcatctaccctgccgtgaacccgctggagtgcgcgtcgcgtatcatggaccccgatgtgatcgatgtggaccactacaacgttgcgcaggatatcgtgcagatgctgaccaagtacaaggagctgcaggatatcattgcggtgcttggcatcgacgagctgagcgaggaagacaaggttgttgtggaccgcgcgcgcaaggtgacccggttcctgtcgcagccgttccaggttgcggaggtgttcacgggcatgacgggccactacgtgcagctggtcgacacggtggagtcgttctctggcct

SEQ ID NO: 862 - DNA, 1265 bp, Leishmania tropica ATCC 30815
ggcgtgccgcccgtgctgacggcgctggatgtgacggaggaccttggccgcgatgagccgctgacgctggagatcgtgcagcacttggacgcgaacacgggccgctgcattgcgatgcagacgacggacctgctgaagctgaagtcgaaggtcgtgtcgaccggcggcaacatctctgtgccggtgggccgtgagacgctgggccgcatcttcaaygttctgggcgacgcgatcgaccagcgcggccccgtgggcgagaagatgcgcatggcgatccacgccgaggccccgaagctggcggatcaggccgcggaggacacgatcctgacgaccggcatcaaggtgatcgacctgattctgccctactgcaagggtggcaagatcggcctgttcggcggtgccggtgtgggcaagactgtgatcatcatggagctgatcaacaacgtcgcgaagggccacggcggtttctccgtgtttgccggcgttggcgagcgcacgcgcgagggcacggacctgtacctggagatgatgcagtcgaaggtgattgacctgaagggcgagtcgaagtgygtgcttgtgtatgggcagatgaacgagcccccgggtgcgcgcgcgcgcgttgcgcagtctgcgctgacgatggcggagtacttccgcgacgtggagggccagaacgtgctgctgttcatcgacaacatcttccgcttcacgcaggcgaactccgaggtgtctgcgctgctgggccgcattccggccgccgtgggctaccagccgacgcttgcggaggatcttggtatgctgcaggagcgcatcacgtcgacaacgaaggggtcgatcacgtccgtgcaggccgtgtacgtgccagcggatgatatcacggatcccgcgcccgcgacgacgttctcgcacctggacgcgacgactgtgctggaccgcgcggtggcggagtcgggcatctaccctgccgtgaacccgctggagtgcgcgtcgcgtatcatggaccctgatgtgatcgatgtggaccactacaacgttgcgcaggatatcgtgcagatgctgaccaagtacaaggagctgcaggatatcattgcggtgcttggcatcgacgagctgagcgaggaagacaaggttgttgtggaccgcgcgcgcaaggtgacccggttcctgtcgcagccgttccaggttgcggaggtgttcacgggcatgacgggccactacgtgcagctggtcgacacggtggagtcgttctctggcctgctgatggg

SEQ ID NO: 863 - DNA, 1191 bp, Bordetella pertussis
atggcaaaaggcaagtttgaacgtaccaagccgcacgtgaacgtgggtacgattggtcacgttgaccacggcaaaacgacgttgacggcggcgatcacgacggtgctgtcgaacaagttcggcggcgaggctcgcggctacgaccagattgacgcggcgccggaagagaaggcgcgtgggatcacgatcaacacctcgcacgttgagtacgagacggagacgcgtcactacgcgcacgttgattgcccgggtcacgctgactacgtgaagaacatgatcacgggtgctgcgcagatggacggcgcgatcctggtggtgtcggccgcagacggcccgatgccgcagacgcgcgagcacattttgctgtcgcgccaggttggcgtgccgtacatcatcgtgttcctgaacaaggcggacatggttgatgacgcggagctgctcgagctggtggagatggaagtccgcgaactgctgagcaagtacgatttcccgggcgatgacacgccgatcgtgaatggtgcggccaagctggcgctggaaagcgacaacggcgacctgggcgagcaggcgattctgtcgctggcgcaagcgctggacacgtacattccgacgccggagcgcgcggtcgacggtgcgttcctgatgccggtggaagacgtgttctcgatctcgggccgtggcacggtggtgactggccgtatcgagcgcggcgtggtgaaggttggcgaggaaatcgaaatcgtgggcatcaagccgacggtgaagacgacctgcacgggcgtggagatgttccgcaagctgctggaccagggccaggcgggcgacaacgtgggtatcttgctgcgcggcaccaagcgtgaagacgtcgagcgtggccaggtgctggccaagccgggttcgatcaacccgcacacggacttcacggccgaggtgtacattctgtccaaggaagagggtggccgtcacacgccgttcttcaacggctatcgtccgcagttctacttccgcacgacggacgtgaccggcacgatcgacctgccggcggacaaggaaatggtgctgccgggcgacaacgtgtcgatgaccgtcaagctgctggccccgatcgccatggaagaaggtctgcgtttcgccatccgtgaaggcggtcgtaccgtcggtgccggcgtcgtcgccaagatcatcaagtaa

SEQ ID NO: 864 - DNA, 1350 bp, Trypanosoma brucei strain LVH/75/USAMRU-K/18
atgggaaaggaaaaggtgcacatgaatcttgtggtggtgggccacgtcgatgccggtaaatccactgcaacgggtcacttgatctacaagtgcggtggtattgacaaacgtacgatcgagaagttcgagaaagaagctgccgacattggtaaggcctcattcaagtacgcatgggtgctggacaagctgaaggctgagcgcgaacgtggtatcacgatcgacattgcactgtggaaattcgagtcacccaagtctgtcttcactattattgatgctcctgggcaccgtgacttcatcaagaacatgatcaccggcacatcgcaagccgacgcagccatcctcatcattgcctctgcgcagggtgagttcgaggctggtatctccaaggatggacagacccgcgagcacgcgttgctggccttcactttgggtgtgaagcagatggttgtgtgctgcaacaaaatggacgacaagactgtgaactacggacaggagcggtatgacgagattgtgaaggaggtgtctgcttacatcaagaaggttgggtacaacgtggagaaggtgcgcttcgtccccatctccggatggcagggcgacaacatgattgagaaatccgagaagatgccatggtacaagggtccaacgctcctggaggcactagacatgctggagccaccagtgcgtccgagcgacaagcccctgcgtctgccactgcagacgtgtacaaagatcggtggtattggcaccgtgcccgttggtcgtgtggagaccggcgtgatgaagcctggtgatgtggtgacgtttgcccccgccaacgtgacgaccgaggtgaaatcgatcgagatgcaccacgagcagctcgctgaggcgacccccggtgacaacgtcggctttaacgtgaagaacgtttctgtaaaggacatccgccgtggcaacgtctgcggtaacaccaagaacgaccccccaaaggaggccgccgacttcacggcacaggtgatcatcctgaaccaccccggacagattggaaacggttatgcgcccgtgctggactgccacacatcgcacattgcctgcaagttcgcggagatcgagtcgaagatcgaccgtcgctctggcaaggagctggagaaggctcccaagtcgatcaagtctggcgacgccgcgatcgtgcgcatggtgccgcagaagcctatgtgcgtggaggtcttcaacgactacgcgccactcggccgctttgccgtgcgtgacatgcgccagaccgtcgctgtcggtatcatcaaggccgtgaccaagaaggacggttctggtggtaaggtgacgaaggctgcggtgaaggcttcgaagaaataa

SEQ ID NO: 865 - DNA, 1052 bp, Cryptosporidium parvum
aagctcaaggctgagagagaaagaggtattaccatcgatattgctttatggcaattcgaaaccccaaaataccactacactgtcattgatgccccaggtcacagagatttcatcaagaatatgattactggtacctctcaagctgatgttgctttattggttgtcccagccgatcgtttcgaaggtgccttctccaaggaaggtcaaaccagagaacatgctttattggccttcactttgggtgtcagacaaatgattgtcggtattaacaagatggatacctgtgaatacaagcaatctcgttttgatgaaatcttcaacgaagttgatggttacctcaagaaggttggttacaacaccgagaagatcccattcgttgccatttctggtttcgttggtgataatatggttgagagatctgacaagatgccatggtataagggtaagaccttagtcgaagccctcgacactatggaaccaccaaagagaccaactgacaagccactccgtctcccattacaagatgtttacaagataggtggtgtaggtactgtcccagtcggtcgtgttgagactggtatcatcagaccaggtatgaatgttaccttcgctccagctggtgttaccactgaagttaagtcagtagaaatgcaccatgagcagatgccagaggccgtcccaggtgacaacgttggtttcaatgttaagaacgtctccatcaaggatatcaagagaggtttcgttgcttctgatgccaagaatgacccagctaagggctgtgaagacttcactgctcaagttatcgtcctcaaccacccaggtgaaatcaagaacggttactctccagtcgttgactgtcacaccgctcacatttcctgcaaattccagactatcactgctaagatggacaagagatctggtaaggttttggaagaaaacccaaagcttatcaagtctggtgatgctgctttggttgttatgcaacctttgaagccactttgtgttgaggccttcactgactacccacctctaggtcgtttcgctgtccgtga

SEQ ID NO: 866 - DNA, 837 bp, Staphylococcus saprophyticus ATCC 35552; identical to SEQ ID NO: 245

SEQ ID NO: 867 - DNA, 818 bp, Zoogloae ramigera ATCC 25935
aaggtattcgatgccttgaaaatggaaggctccgagctgaccctggaagtacaacagcagctgggcgacggcattgtccgtaccattgcactgggtacctccgacggcctgcgtcgcggcatgatgatccagaacaccggcaaacctatcatggtgccagtcggtaaagcaaccctgggtcgcatcatggacgtgctgggtaacccgatcgacgaatgcggcgcggtcgctcacgaccagatcgcttcgatccaccgcgctcctcctgcgtacgacgaactgtcgccatcgcaagatctgctggaaaccggcattaaagttattgacctggtgtgcccgttcgccaagggcggtaaagtcggtctgttcggcggtgcaggtgtgggcaagaccgtgaacatgatggaactgatcaacaacatcgccaaagcacactcgggtctgtccgtgtttgccggtgtgggtgagcgtacccgtgaaggtaacgacttctaccacgagatggctgacgccaaagtggtcgatctggaaaatccagagaactccaaggttgcgatggtctacggtcagatgaatgaaccaccaggcaaccgtctgcgcgtggcgctgaccggtctgaccatggctgaagcattccgtgacgaaggcaaagacgttctgttcttcgtggacaacatctaccgcttcaccctggccggtaccgaagtatcggcactgctgggccgtatgccatcggctgtgggttaccagcctacgctggccgaagaaatgggtcgcctgcaagagcgcatcacttcgaccaagaccggttcgatcac

SEQ ID NO: 868 - DNA, 778 bp, Staphylococcus saprophyticus ATCC 43867
ctatcttagtagtatctgctgctgatggcccaatgccacaaactcgtgaacacattcttttatcacgtaacgttggtgttccagcattagttgtattcttaaacaaagttgacatggttgacgatgaagaattattagaattagtagaaatggaagttcgtgacttattaagcgaatatgacttcccaggtgacgatgtacctgtaatctctggttctgcattaaaagctttagaaggcgacgctgactatgagcaaaaaatcttagacttaatgcaagctgttgatgacttcattccaacaccagaacgtgattctgacaaaccattcatgatgccagttgaggacgtattctcaatcactggtcgtggtactgttgctacaggccgtgttgaacgtggtcaaatcaaagtcggtgaagaaatcgaaatcatcggtatgcaagaagaatcaagcaaaacaactgttactggtgtagaaatgttccgtaaattattagactacgctgaagctggtgacaacattggtgcattattacgtggtgtttcacgtgatgacgtacaacgtggtcaagttttagctgctcctggtactattacaccacatacaaaattcaaagcggatgtttacgttttatctaaagatgaaggtggtcgtcatacaccattcttcactaactaccgcccacaattctatttccgtactactgacgtaactggtgttgttaacttaccagaaggtactgaaatggttatgcctggcgataacgttgaaatgga

SEQ ID NO: 869 - DNA, 640 bp, Enterococcus casseliflavus strain R689
tggtcctatgcctcaaacacgtgaacacatcttgttatcacgtaacgttggtgtaccatacatcgttgttttcttaaacaaaatggatatggttgatgacgaagaattactagaattagttgaaatggaagttcgtgacttattgtcagaatatgacttcccaggcgacgatgttcctgtaatcgctggttctgctttgaaagctcttgaaggcgatgcttcatacgaagaaaaaatcatggaattaatggctgcagttgacgaatacgttccaactccagaacgtgacactgacaaaccattcatgatgccagtcgaagacgtattctcaatcactggacgtggtactgttgctacaggccgtgttgaacgtggacaagttcgcgttggtgacgaagttgaaatcgttggtattgctgaagaaactgctaaaacaactgtaactggtgttgaaatgttccgtaaattgttagactatgctgaagcaggggataacattggtgcattgctacgtggtgttgctcgtgaagacatccaacgtggacaagtattggctaaagctggtacaatcacacctcatacaaaatttaaagctgaagtttacgttttaacaaaagaagaaggtggacgtcacactcca

SEQ ID NO: 870 - DNA, 644 bp, Enterococcus casseliflavus strain R754
gtcctatgcctcaaacacgtgaacacatcttgttatcacgtaacgttggtgtaccatacatcgttgttttcttaaacaaaatggatatggttgatgacgaagaattactagaattagttgaaatggaagttcgtgacttattgtcagaatatgacttcccaggcgacgatgttcctgtaatcgctggttctgctttgaaagctcttgaaggcgatgcttcatacgaagaaaaaatcatggaattaatggctgcagttgacgaatacgttccaactccagaacgtgacactgacaaaccattcatgatgccagtcgaagacgtattctcaatcactggacgtggtactgttgctacaggccgtgttgaacgtggacaagttcgcgttggtgacgaagttgaaatcgttggtattgctgaagaaactgctaaaacaactgtaactggtgttgaaatgttccgtaaattgttagactatgctgaagcaggggataacattggtgcattgctacgtggtgttgctcgtgaagacatccaacgtggacaagtattggctaaagctggtacaatcacacctcatacaaaatttaaagctgaagtttacgttttaacaaaagaagaaggtggacgtcacacaccattcttc

SEQ ID NO: 871 - DNA, 637 bp, Enterococcus flavescens strain R758
tcctatgcctcaaacacgtgaacacatcttgttatcacgtaacgttggtgtaccatacatcgttgttttcttaaacaaaatggatatggttgatgacgaagaattactagaattagttgaaatggaagttcgtgacttattgtcagaatatgacttcccaggcgacgatgttcctgtaatcgctggttctgctttgaaagctcttgaaggcgatgcttcatacgaagaaaaaatcatggaattaatggctgcagttgacgaatacgttccaactccagaacgtgacactgacaaaccattcatgatgccagtcgaagacgtattctcaatcactggacgtggtactgttgctacaggccgtgttgaacgtggacaagttcgcgttggtgacgaagttgaaatcgttggtattgctgaagaaactgctaaaacaactgtaactggtgttgaaatgttccgtaaattgttagactatgctgaagcaggggataacattggtgcattgctacgtggggttgctcgtgaagacatccaacgtggacaagtattagctaaagctggtacaatcacacctcatacaaaatttaaagctgaagtttacgttttaacaaaagaagaaggtggacgtcacactcca

SEQ ID NO: 872 - DNA, 643 bp, Enterococcus gallinarum strain R631
gtcctatgcctcaaactcgtgaacacatcttgttatcacgtaacgttggcgtaccatacatcgttgttttcttgaacaaaatggatatggttgatgacgaagaattgctagaattagttgaaatggaagttcgtgacctattgtctgaatatgacttcccaggcgacgatgttcctgtaatcgccggttctgctttgaaagctcttgaaggagatccttcatacgaagaaaaaatcatggaattgatggctgcagttgacgaatacgttccaactccagaacgtgatactgacaaaccattcatgatgccagtcgaagacgtattctcaatcactggacgtggtactgttgctacaggccgtgttgaacgtggacaagttcgcgttggtgatgaagtagaaatcgttggtattgctgacgaaactgctaaaacaactgtaacaggtgttgaaatgttccgtaaattgttagactatgctgaagcaggggataacattggtgcattgctacgtggggttgctcgtgaagacatccaacgtggacaagtattggctaaagctggtacaatcacacctcatacaaaattcaaagctgaagtttatgttttgacaaaagaagaaggtggacgtcacactccattctt

SEQ ID NO: 873 - DNA, 641 bp, Enterococcus gallinarum strain R691
gtcctatgcctcaaactcgtgaacacatcttgttatcacgtaacgttggcgtaccatacatcgttgttttcttgaacaaaatggatatggttgatgacgaagaattgctagaattagttgaaatggaagttcgtgacctattgtctgaatatgacttcccaggcgacgatgttcctgtaatcgccggttctgctttgaaagctcttgaaggagatccttcatacgaagaaaaaatcatggaattgatggctgcagttgacgaatacgttccaactccagaacgtgatactgacaaaccattcatgatgccagtcgaagacgtattctcaatcactggacgtggtactgttgctacaggccgtgttgaacgtggacaagttcgcgttggtgatgaagtagaaatcgttggtattgctgacgaaactgctaaaacaactgtaacaggtgttgaaatgttccgtaaattgttagactatgctgaagcaggggataacattggtgcattgctacgtggggttgctcgtgaagacatccaacgtggacaagtattggctaaagctggtacaatcacacctcatacaaaattcaaagctgaagtttatgttttgacaaaagaagaaggtggacgtcacactccattc

SEQ ID NO: 874 - DNA, 681 bp, Staphylococcus haemolyticus strain LSPQ 2514
accagcattagtagtattcttaaataaagttgacatggttgacgatgaagaattattagaattagttgaaatggaagtacgtgacttattatctgaatacgacttcccaggtgacgatgtacctgtaatcgctggttcagcattaaaagctttagaaggcgatgctcaatacgaagaaaaaatcttagaattaatgcaagcagttgatgactacattccaactccagaacgtgattctgacaaaccattcatgatgccagttgaggacgtattctcaatcactggtcgtggtactgttgctacaggccgtgttgaacgtgggcaaatcaaagttggtgaagaagttgaaatcattggtatccatgacacttctaaaacaactgttactggtgtagaaatgttccgtaaattattagactacgctgaagctggtgacaacatcggtgcattattacgtggtgttgctcgtgaagacgtacaacgtggtcaagtattagctgctccaggttcaatcacacctcacacaaaatttaaagcagacgtatacgttttatctaaagacgaaggtggacgtcacactccattcttcacaaactatcgtccacaattctatttccgtactactgacgtaactggtgttgttaacttaccagaaggtactgaaatggttatgcctggcga

SEQ ID NO: 875 - DNA, 675 bp, Staphylococcus epidermidis strain R591
attatcacgtaacgttggtgtaccagcattagttgtattcttaaacaaagttgacatggtagacgacgaagaattattagaattagttgaaatggaagttcgtgacttattaagcgaatatgacttcccaggtgacgatgtacctgtaatcgctggttctgcattaaaagcattagaaggcgatgctgaatacgaacaaaaaatcttagacttaatgcaagcagttgatgattacattccaactccagaacgtgattctgacaaaccattcatgatgccagttgaggacgtattctcaatcactggtcgtggtactgttgctacaggccgtgttgaacgtggtcaaatcaaagttggtgaagaagttgaaatcatcggtatgcacgaaacttctaaaacaactgttactggtgtagaaatgttccgtaaattattagactacgctgaagctggtgacaacatcggtgctttattacgtggtgttgcacgtgaagacgtacaacgtggtcaagtattagctgctcctggttctattacaccacacacaaaattcaaagctgaagtatacgtattatctaaagatgaaggtggacgtcacactccattcttcactaactatcgcccacaattctatttccgtactactgacgtaactggtgttgtaaacttaccaga

SEQ ID NO: 876 - DNA, 704 bp, Staphylococcus epidermidis strain CSG 10
tcttattatcacgtaacgttggtgtaccagcattagttgtattcttaaacaaagttgacatggtagacgacgaagaattattagaattagttgaaatggaagttcgtgacttattaagcgaatatgacttcccaggtgacgatgtacctgtaatcgctggttctgcattaaaagcattagaaggcgatgctgaatacgaacaaaaaatcttagacttaatgcaagcagttgatgattacattccaactccagaacgtgattctgacaaaccattcatgatgccagttgaggacgtattctcaatcactggtcgtggtactgttgctacaggccgtgttgaacgtggtcaaatcaaagttggtgaagaagttgaaatcatcggtatgcacgaaacttctaaaacaactgttactggtgtagaaatgttccgtaaattattagactacgctgaagctggtgacaacatcggtgctttattacgtggtgttgcacgtgaagacgtacaacgtggtcaagtattagctgctcctggttctattacaccacacacaaaattcaaagctgaagtatacgtattatctaaagatgaaggtggacgtcacactccattcttcactaactatcgcccacaattctatttccgtactactgacgtaactggtgttgtaaacttaccagaaggtacagaaatggttatgcctggc

SEQ ID NO: 877 - DNA, 770 bp, Staphylococcus epidermidis ATCC 35984
tcttagttgtatctgctgctgacggtccaatgccacaaactcgtgaacacatcttattatcacgtaacgttggtgtaccagcattagttgtattcttaaacaaagttgacatggtagacgacgaagaattattagaattagttgaaatggaagttcgtgacttattaagcgaatatgacttcccaggtgacgatgtacctgtaatcgctggttctgcattaaaagcattagaaggcgatgctgaatacgaacaaaaaatcttagacttaatgcaagcagttgatgattacattccaactccagaacgtgattctgacaaaccattcatgatgccagttgaggacgtattctcaatcactggtcgtggtactgttgctacaggccgtgttgaacgtggtcaaatcaaagttggtgaagaagttgaaatcatcggtatgcacgaaacttctaaaacaactgttactggtgtagaaatgttccgtaaattattagactacgctgaagctggtgacaacatcggtgctttattacgtggtgttgcacgtgaagacgtacaacgtggtcaagtattagctgctcctggttctattacaccacacacaaaattcaaagctgaagtatacgtattatctaaagatgaaggtggacgtcacactccattcttcactaactatcgcccacaattctatttccgtactactgacgtaactggtgttgtaaacttaccagaaggtacagaaatggttatgcctggcgacaacgttgaaatg

SEQ ID NO: 878 - DNA, 716 bp, Staphylococcus epidermidis ATCC 35983
ttgtattcttaaacaaagttgacatggtagacgacgaagaattattagaattagttgaaatggaagttcgtgacttattaagcgaatatgacttcccaggtgacgatgtacctgtaatcgctggttctgcattaaaagcattagaaggcgatgctgaatacgaacaaaaaatcttagacttaatgcaagcagttgatgattacattccaactccagaacgtgattctgacaaaccattcatgatgccagttgaggacgtattctcaatcactggtcgtggtactgttgctacaggccgtgttgaacgtggtcaaatcaaagttggtgaagaagttgaaatcatcggtatgcacgaaacttctaaaacaactgttactggtgtagaaatgttccgtaaattattagactacgctgaagctggtgacaacatcggtgctttattacgtggtgttgcacgtgaagacgtacaacgtggtcaagtattagctgctcctggttctattacaccacacacaaaattcaaagctgaagtatacgtattatctaaagatgaaggtggacgtcacactccattcttcactaactatcgcccacaattctatttccgtactactgacgtaactggtgttgtaaacttaccagaaggtacagaaatggttatgcctggcgacaacgttgaaatgacagttgaattaatcgctccaatcgctatcgaa

SEQ ID NO: 879 - DNA, 640 bp, Enterococcus gallinarum strain R764
cggtcctatgcctcaaactcgtgaacacatcttgttatcacgtaacgttggcgtaccatacatcgttgttttcttgaacaaaatggatatggttgatgacgaagaattgctagaattagttgaaatggaagttcgtgacctattgtctgaatatgacttcccaggcgacgatgttcctgtaatcgccggttctgctttgaaagctcttgaaggagatccttcatacgaagaaaaaatcatggaattgatggctgcagttgacgaatacgttccaactccagaacgtgatactgacaaaccattcatgatgccagtcgaagacgtattctcaatcactggacgtggtactgttgctacaggccgtgttgaacgtggacaagttcgcgttggtgatgaagtagaaatcgttggtattgctgacgaaactgctaaaacaactgtaacaggtgttgaaatgttccgtaaattgttagactatgctgaagcaggggataacattggtgcattgctacgtggggttgctcgtgaagacatccaacgtggacaagtattggctaaagctggtacaatcacacctcatacaaaattcaaagctgaagtttatgttttgacaaaagaagaaggtggacgtcacactcca

SEQ ID NO: 880 - DNA, 831 bp, Pseudomonas aeruginosa strain PAO-1
cggcgcgatcctggtttgctcggctgccgacggccccatgccgcagacccgcgagcacatcctgctgtcccgccaggtaggcgttccctacatcgtcgtgttcctgaacaaggccgacatggtcgacgacgccgagctgctggaactggtcgagatggaagttcgcgatctgctgaacacctacgacttcccgggcgacgacactccgatcatcatcggttccgcgctgatggcgctggaaggcaaggatgacaacggcatcggcgtaagcgccgtgcagaagctggtagagaccctggactcctacattccggagccggttcgtgccatcgaccagccgttcctgatgccgatcgaagacgtgttctcgatctccggccgcggtaccgtggtaaccggtcgtgtagagcgcggcatcatcaaggtccaggaagaagtggaaatcgtcggcatcaaggcgaccaccaagactacctgcaccggcgttgaaatgttccgcaagctgctcgacgaaggtcgtgctggtgagaacgttggtatcctgctgcgtggcaccaagcgtgaagacgtagagcgtggccaggttctggccaagccgggcaccatcaagccgcacaccaagttcgagtgcgaagtgtacgtgctgtccaaggaagaaggtggtcgtcacaccccgttcttcaagggctaccgtccgcagttctacttccgtaccaccgaygtgaccggtaactgcgaactgccggaaggcgtagagatggtaatgccgggcgacaacatcaagatggttgtcaccctgatcgctccgatcgccatggaagatggcctgcg

SEQ ID NO: 881 - DNA, 642 bp, Enterococcus casseliflavus strain R421
cctatgcctcaaacacgtgaacacatcttgttatcacgtaacgttggtgtaccatacatcgttgttttcttaaacaaaatggatatggttgatgacgaagaattactagaattagttgaaatggaagttcgtgacttattgtcagaatatgacttcccaggcgacgatgttcctgtaatcgctggttctgctttgaaagctcttgaaggcgatgcttcatacgaagaaaaaatcatggaattaatggctgcagttgacgaatacgttccaactccagaacgtgacactgacaaaccattcatgatgccagtcgaagacgtattctcaatcactggacgtggtactgttgctacaggccgtgttgaacgtggacaagttcgcgttggtgacgaagttgaaatcgttggtattgctgaagaaactgctaaaacaactgtaactggtgttgaaatgttccgtaaattgttagactatgctgaagcaggggataacattggtgcattgctacgtggtgttgctcgtgaagacatccaacgtggacaagtattggctaaagctggtacaatcacacctcatacaaaatttaaagctgaagtttacgttttaacaaaagaagaaggtggacgtcacacaccattcttc

SEQ ID NO: 882 - DNA, 636 bp, Enterococcus casseliflavus strain R775
cctatgcctcaaacacgtgaacacatcttgttatcacgtaacgttggtgtaccatacatcgttgttttcttaaacaaaatggatatggttgatgacgaagaattactagaattagttgaaatggaagttcgtgacttattgtcagaatatgacttcccaggcgacgatgttcctgtaatcgctggttctgctttgaaagctcttgaaggcgatgcttcatacgaagaaaaaatcatggaattaatggctgcagttgacgaatacgttccaactccagaacgtgacactgacaaaccattcatgatgccagtcgaagacgtattctcaatcactggacgtggtactgttgctacaggccgtgttgaacgtggacaagttcgcgttggtgacgaagttgaaatcgttggtattgctgaagaaactgctaaaacaactgtaactggtgttgaaatgttccgtaaattgttagactatgctgaagcaggggataacattggtgcattgctacgtggtgttgctcgtgaagacatccaacgtggacaagtattggctaaagctggtacaatcacacctcatacaaaatttaaagctgaagtttacgttttaacaaaagaagaaggtggacgtcatacacca

SEQ ID NO: 883 - DNA, 641 bp, Enterococcus faecalis strain R422
ggtcctatgcctcaaacacgtgaacatatcttattatcacgtaacgttggtgtaccatacatcgttgtattcttaaacaaaatggatatggttgatgacgaagaattattagaattagtagaaatggaagttcgtgacttattatcagaatacgatttcccaggcgatgatgttccagttatcgcaggttctgctttgaaagctttagaaggcgacgagtcttatgaagaaaaaatcttagaattaatggctgcagttgacgaatatatcccaactccagaacgtgatactgacaaaccattcatgatgccagtcgaagacgtattctcaatcactggacgtggtactgttgctacaggccgtgttgaacgtggtgaagttcgcgttggtgacgaagttgaaatcgttggtattaaagacgaaacatctaaaacaactgttacaggtgttgaaatgttccgtaaattattagactacgctgaagcaggcgacaacatcggtgctttattacgtggtgtagcacgtgaagatatcgaacgtggacaagtattagctaaaccagctacaatcactccacacacaaaattcaaagctgaagtatacgtattatcaaaagaagaaggcggacgtcacactccatt

SEQ ID NO: 884 - DNA, 640 bp, Enterococcus faecalis strain R575
tatgcctcaaacacgtgaacatatcttattatcacgtaacgttggtgtaccatacatcgttgtattcttaaacaaaatggatatggttgatgacgaagaattattagaattagtagaaatggaagttcgtgacttattatcagaatacgatttcccaggcgatgatgttccagttatcgcaggttctgctttgaaagctttagaaggcgacgagtcttatgaagaaaaaatcttagaattaatggctgcagttgacgaatatatcccaactccagaacgtgatactgacaaaccattcatgatgccagtcgaagacgtattctcaatcactggacgtggtactgttgctacaggccgtgttgaacgtggtgaagttcgcgttggtgacgaagttgaaatcgttggtattaaagacgaaacatctaaaacaactgttacaggtgttgaaatgttccgtaaattattagactacgctgaagcaggcgacaacatcggtgctttattacgtggtgttgcacgtgaagatatcgaacgtggacaagtattagctaaaccagctacaatcactccacacacaaaattcaaagctgaagtatacgtattatcaaaagaagaaggcggacgtcacactccattcttc

SEQ ID NO: 885 - DNA, 632 bp, Enterococcus faecium strain R492
tgcctcaaactcgtgaacacatcctattgtctcgtcaagttggtgttccttacatcgttgtattcttgaacaaagtagacatggttgatgacgaagaattactagaattagttgaaatggaagttcgtgacctattaacagaatacgaattccctggtgacgatgttcctgtagttgctggatcagctttgaaagctctagaaggcgacgcttcatacgaagaaaaaattcttgaattaatggctgcagttgacgaatacatcccaactccagaacgtgacaacgacaaaccattcatgatgccagttgaagacgtgttctcaattactggacgtggtactgttgctacaggtcgtgttgaacgtggacaagttcgcgttggtgacgaagttgaagttgttggtattgctgaagaaacttcaaaaacaacagttactggtgttgaaatgttccgtaaattgttagactacgctgaagctggagacaacattggtgctttactacgtggtgttgcacgtgaagacatccaacgtggacaagttttagctaaaccaggtacaatcacacctcatacaaaattctctgcagaagtatacgtgttgacaaaagaagaaggtggacgtcatactcca

SEQ ID NO: 886 - DNA, 640 bp, Enterococcus faecium strain R576
cggcccaatgcctcaaactcgtgaacacatcctattgtctcgtcaagttggtgttccttacatcgttgtattcttgaacaaagtagacatggttgatgacgaagaattactagaattagttgaaatggaagttcgtgacctattaacagaatacgaattccctggtgacgatgttcctgtagttgctggatcagctttgaaagctctagaaggcgacgcttcatacgaagaaaaaattcttgaattaatggctgcagttgacgaatacatcccaactccagaacgtgacaacgacaaaccattcatgatgccagttgaagacgtgttctcaattactggacgtggtactgttgctacaggtcgtgttgaacgtggacaagttcgcgttggtgacgaagttgaagttgttggtattgctgaagaaacttcaaaaacaacagttactggtgttgaaatgttccgtaaattgttagactacgctgaagctggagacaacattggtgctttactacgtggtgttgcacgtgaagacatccaacgtggacaagttttagctaaaccaggtacaatcacacctcatacaaaattctctgcagaagtatacgtgttgacaaaagaagaaggtggacgtcatactcca

SEQ ID NO: 887 - DNA, 806 bp, Zoogloae ramigera ATCC 25935
atcctggtttgctccgcagctgacggcccaatgccacagacccgcgagcacatcctgctggcccgccaagttggcgttccatacatcatcgtgttcctgaacaagtgcgacctggttgacgacgcagaactgctggaactggtcgaaatggaagtgcgtgaattgctgtcgaaatacgagttcccaggcgacgacgtaccaatcatcaagggttcggcacgtatggcgctggaaggcaaagaaggcgagatgggcgttgacgccatcatgcgtctggccgatgcactggacagctacatccctacgccagagcgcgcagtcgatggcgccttcctgatgccagtggaagacgtgttctcgatctcgggtcgcggtaccgttgtgaccggtcgtatcgagcgcggcgtgatcaaggtcggcgaagagatcgaaatcgtcggcattatcgacaccgtcaaaaccacttgcaccggcgtggaaatgttccgcaagctgctggaccagggtcaagccggcgacaacgttggtctgctgctgcgcggcaccaagcgtgaagacgtacagcgtggtcaggttctggccaagccagcgtcgatcaagccgcacaaccacttcaccggcgagatctacgttctgtcgaaagatgaaggcggccgtcacaccccgttcttcaacaactatcgtccacagttctacttccgtacgactgacgtgaccggttcgatcgaactgccagcagacaaagaaatggtcatgccaggcgacaacgtgtcgatcaccgtcaagctgatcaacccgatcgcgat

SEQ ID NO: 888 - DNA, 634 bp, Enterococcus faecalis strain R503
tatgcctcaaacacgtgaacatatcttattatcacgtaacgttggtgtaccatacatcgttgtattcttaaacaaaatggatatggttgatgacgaagaattattagaattagtagaaatggaagttcgtgacttattatcagaatacgatttcccaggcgatgatgttccagttatcgcaggttctgctttgaaagctttagaaggcgacgagtcttatgaagaaaaaatcttagaattaatggctgcagttgacgaatatatcccaactccagaacgtgatactgacaaaccattcatgatgccagtcgaagacgtattctcaatcactggacgtggtactgttgctacaggccgtgttgaacgtggtgaagttcgcgttggtgacgaagttgaaatcgttggtattaaagacgaaacatctaaaacaactgttacaggtgttgaaatgttccgtaaattattagactacgctgaagcaggcgacaacatcggtgctttattacgtggtgtagcacgtgaagatatcgaacgtggacaagtattagctaaaccagctacaatcactccacacacaaaattcaaagctgaagtatacgtattatcaaaagaagaaggcggacgtcacactcca

SEQ ID NO: 889 - DNA, 493 bp, Aspergillus fumigatus ATCC 14110
tgtcttcatccaggaattgattgtgagtcgttccacatgctcacctagttttcgctcgatcttttcactaacgcaaaccatgtagaacaacattgccaaggcccacggtggttactccgtcttcactggtgttggtgagcgtactcgtgagggtaacgatctgtaccacgaaatgcaggagactggtgtcattcagctcgagggtgaatccaaggtcgcactggtgttcggacagatgaacgagccccccggtgcccgtgcccgtgtcgcccttaccggtctgaccattgccgagtacttccgtgacgaggagggtcaggacgtgctgctcttcattgacaacattttccgtttcacccaggccggttctgaggtgtctgcccttctcggtcgtatcccctctgccgtcggttaccagcccaccctggccgtcgacatgggtggtatgcaggagcgtatcaccaccaccaagaagggttctattacctccgtc

SEQ ID NO: 890 - DNA, 466 bp, Penicillium marneffei ATCC 64101
ttgattgtacgtctttacctttctgcctgactgtttacgacaactaacgaaagcgtagaacaacattgccaaggctcacggtggttactctgtcttcactggtgtcggtgaacgtactcgtgagggtaacgatttgtaccacgaaatgcaggaaactggtgtcattcagctcgagggtgaatccaaggtcgccctcgtgttcggtcagatgaacgagccccccggtgcccgtgcccgtgtcgctcttactggtttgaccattgccgagtacttccgtgacgaggaaggtcaggacgtgcttctcttcattgacaacattttccgtttcactcaggccggttctgaggtgtctgcccttctgggtcgtatcccctctgccgtcggttaccagcccacccttgccgtcgacatgggtatcatgcaggagcgtattaccaccaccaccaagggttccatcacctccgtc

SEQ ID NO: 891 - DNA, 478 bp, Paecilomyces lilacinus ATCC 42570
aggagctgatcaacaacatcgccaaggctcacggtggttactccgtcttcactggtgtcggtgagcgtacccgtgagggtaacgatctgtaccacgaaatgcaggagacctcggtcattcagctcgagggcgagtctaaggtggccctggtctttggtcagatgaacgagcccccgggtgctcgtgcccgtgtcgctcttactggtcttaccgtcgccgagtacttccgtgaccaggagggtcaggatggttagttctcgtccactcatgccgaaacatgtgcgtgttccgaggctaatcaacgtgccagtgctgcttttcatcgacaacattttccgattcacacaggccggttccgaggtgtctgccctgctgggtcgtatcccctctgccgtcggttaccagcccaccctcgccgtcgacatgggtggcatgcaggagcgtatcaccaccaccaagaagggctctatcacctccg

SEQ ID NO: 892 - DNA, 481 bp, Penicillium marneffei ATCC 58950
gtctttatccaggagttgattgtacgtctttacctttctgcctgactgtttacgacaactaacgaaagcgtagaacaacattgccaaggctcacggtggttactctgtcttcactggtgtcggtgaacgtactcgtgagggtaacgatttgtaccacgaaatgcaggaaactggtgtcattcagctcgagggtgaatccaaggtcgccctcgtgttcggtcagatgaacgagccccccggtgcccgtgcccgtgtcgctcttactggtttgaccattgccgagtacttccgtgacgaggaaggtcaggacgtgcttctcttcattgacaacattttccgtttcactcaggccggttctgaggtgtctgcccttctgggtcgtatcccctctgccgtcggttaccagcccacccttgccgtcgacatgggtatcatgcaggagcgtattaccaccaccaccaagggttccatcacctccgtc

SEQ ID NO: 893 - DNA, 1208 bp, Sporothrix schenckii ATCC 14285
ctcgtccgtggtgctaaggccactgacactggttsccccattaccatccscgtcggccccggtaccctcggtcgcatcatgaacgtcaccggtgacccgatcgacgagcgcggtcccatcaagaccgacaagttccgtcccatccacgctgaggctcccgagttcgttgaccagtcgaccaccgctgaggttctcgtgactggtatcaaggtcgtcgatctgcttgctccctacgcccgtggtggtaagattggtctgtttggcggtgccggtgttggcaagaccgtgttcatccaggagctcatcaacaacatcgccaaggcccacggtggttactccgtcttcaccggtgtcggcgagcgtacccgtgagggtaacgatctgtaccacgaaatgcaggagacctctgtcattcagcttgacggtgactccaaggtcgccctggtgttcggtcagatgaacgagccccctggtgctcgtgcccgtgtcgccttgaccggtttgactgtcgctgagtacttccgtgacgaggagggccaggatggtatgttttgaattatttccttgtcgtacagttccaaatcgaagaattactaacttgtcagtgcttctcttcatcgacaacattttccgcttcacccaggccggttctgaggtgtctgcccttctgggtcgtattccctccgctgtcggttaccagcccacgctcgccgtggacatgggtctgatgcaggagcgtattaccaccacccgcaagggctcaattacctccgtccaggccgtctacgtgcccgctgacgatctgacggatcccgcccccgccaccaccttcgcccatctggacgccaccactgtgctgtcccgaggtatctctgagctgggtatctaccccgctgtcgaccccctcgactccaagtcgcgtatgctggacccccgtattgtcggtgacgaccactacgagaccgccactcgcgtccagcagatcctccaagagtacaagtcgctgcaggacatcatcgccattctgggtatggacgagctgtctgaggccgacaagcttacagtcgagcgtgctcgtaagatccagcgtttcctgagccagccgttcacggtcgcgcaggtcttcactggtatcgaaggccagctggtcgatctgaaggacactatcgcttcgttcaaggctatcctgagcggtgagggtgacagcc

SEQ ID NO: 894 - DNA, 534 bp, Malbranchea filamentosa ATCC 48174
ttcaggaacttattgtaagccgccctctttatgcattgagggtgaataagaaggctgacaggtaatagaacaacattgccaaggctcacggtggttactccgtgttcactggtgtcggtgagcgtacccgtgaaggaaacgatctgtaccatgaaatgcaggaaacccgcgtcatccagcttgatggcgagtctaaggtcgcccttgtgttcggtcagatgaacgagccccctggagcccgtgcccgtgtcgctcttactggtcttaccgttgccgaatacttccgtgacgaggagggccaagatggtacgcctttttactcttcttattcttcgggtcggactacagaactaacctgctccagtgcttctcttcattgataacattttccgtttcacacaagccggttctgaggtgtctgccttgcttggacgtattccctctgccgtcggttaccagcccactctcgccgtcgacatgggtggtatgcaggaacgtatcacaaccaccaacaagggttccattacttccgtg

SEQ ID NO: 895 - DNA, 448 bp, Paecilomyces lilacinus ATCC 60735
caaggctcacggtggttactccgtcttcactggtgtcggtgagcgtacccgtgagggtaacgatctgtaccacgaaatgcaggagacctcggtcattcagctcgagggcgagtctaaggtggccctggtctttggtcagatgaacgagcccccgggtgctcgtgcccgtgtcgctcttactggtcttaccgtcgccgagtacttccgtgaccaggagggtcaggatggttagttctcgtccactcatgccgaaacatgtgcgtgttccgaggctaatcaacgtgccagtgctgcttttcatcgacaacattttccgattcacccaggccggttccgaggtgtctgccctgctgggtcgtatcccctctgccgtcggttaccagcccaccctcgccgtcgacatgggtggcatgcaggagcgtatcaccaccaccaagaagggctctat

SEQ ID NO: 896 - DNA, 483 bp, Aspergillus niger ATCC 9508
attcaggagctgattgtaagttgccaatccatgaactggagatttggtgtgacccatagaactaacaaattatttagaacaacatcgccaaggctcacggtggttactccgtcttctgtggtgtcggtgagcgtactcgtgagggtaacgatctgtaccacgaaatgcaggagactggtgtcatccagctcgagggtgactccaaggtcgctctggtcttcggtcagatgaacgagcccccgggtgcccgtgcccgtgtcgcccttaccggtctgaccattgccgagtacttccgtgacgaggagggtcaggacgtgctgctcttcattgacaacattttccgtttcacccaggccggttctgaggtgtctgcccttctgggtcgtatcccctctgccgtcggttaccagcccactctggccgtcgacatgggtggtatgcaggagcgtattaccaccaccaccaagggttccattacctccg

SEQ ID NO: 897 - DNA, 1124 bp, Aspergillus fumigatus ATCC 14110
aagctcaagtccgagcgtgagcgtggtatcaccatcgacattgccctctggaagttccagactcccaagtatgaggtcactgtcatcggtaagctcgactcgccccgatatgttttggtgctgtagctaacacgatctgaagatgcccccggtcaccgtgacttcatcaagaacatgatcactggtacctcccaggctgactgcgctatcctcatcattgcctccggtactggtgagttcgaggctggtatctccaaggatggccagacccgtgagcacgctctgctggctttcaccctcggtgtcaagcagctcatcgtcgccctcaacaagatggacacctgcaagtggtccgaggatcgttacaacgaaattgtcaaggaaacctccaacttcatcaagaaggtcggctacaaccccaaggccgttcccttcgtccccatctctggcttcaacggtgacaacatgcttgagccctcctccaactgcccctggtacaagggatgggagaaggagaccaaggccggcaaggtcactggtaagaccctcatcgaggccatcgacgccattgagccccctgtccgtccctycaacaagcccctccgtcttcccctccaggatgtctacaagatctctggtatcggaacggtccctgtcggccgtgtcgagaccggtatcatcaagcccggcatggtcgtcaccttcgcccccgccaacgtcaccactgaagtcaagtccgtcgagatgcaccaccagcagctccaggagggtgtccccggtgacaacgtcggtttcaacgtcaagaacgtttccgtcaaggaagtccgccgtggtaacgtctgcggtgactccaagaacgatccccctcagggtgctgcctccttcaacgcccaggtcatcgtcctcaaccaccccggtcaggtcggcgctggttacgcccccgtcctcgactgccacactgcccacattgcttgcaagttctctgagctgcttgagaagattgaccgccgtaccggcaagtctgttgagaacaaccccaagttcatcaagtccggtgatgccgccatcgtgaagatggttccttccaagcccatgtgtgtcgagtccttcactgactacccccc

SEQ ID NO: 898 - DNA, 1363 bp, Penicillium marneffei strain WSA-214
ctcaaggctgagcgtgagcgtggtatcaccatcgatattgctctctggaagttccagactgccaagtacgaggttaccgtcattgacgcccccggtcaccgtgatttcatcaagaacatgatcactggtacctcccaggccgattgcgctattctcatcattgcctctggtactggtgaattcgaggctggtatctccaaggatggccagactcgtgagcacgctcttttggctttcaccctcggtgtccgtcagctcattgttgccctcaacaagatggacacttgcaagtggtctcagggtgagtactcgtacctgcgtttggccttgaatatcttactaatgcaccatagatcgttacaacgaaattgtcaaggagacttccaacttcatcaagaaggtcggatacaaccctaagaacgttcctttcgttcctatctccggtttcaacggtgacaacatgcttgagccctcccccaactgcccctggtacaagggttgggagaaggagaccaaggccggtaaggtcactggtaagaccctcctcgaggccatcgacgccattgagccccctacccgtcccgccaacaaggttagtccctcctcgactactcaaaccctcctcataagttcatgattacgactcgttcacagcccctccgtcttcccctccaggatgtctacaagatcggtggtattggaacggttcccgtcggtcgtgttgagactggtaccatcgttcctggtatggttgtcaccttgtaagtcactctcctcgcttatcctacctgaaatcatcatgtgctaacttgacactcagcgctcccgccaacgtcaccactgaagtcaagagtgttgaaatgcaccaccagcagctcactgccggtcagcccggtgacaacgttggtttcaacgtgaagaacgtctccgtcaaggaaatccgtcgtggtaacgttgctggtgacagcaagaacgacccccctgccggtgctgcctccttcaacgcccaggtcatcgtcctcaaccaccccggtcaggtcggtgctggttacgccccagtcctcgattgccacactgcccacattgcttgcaagttcgctgagctcctcgagaagattgaccgtcgtaccggaaagtctgttgaggaccaccccaagttcatcaagtccggtgacgctgccatcgtcaagatgattccttccaagcccatgtgtgttgaggctttcaccgagtaccctcctctcggtcgtttcgccgttcgcgagtaagttttatctccgttgtctattttccatccttcccttctcctccgtcttccatatatattttttcagttatatgtgactaaccacaaatcacggga

SEQ ID NO: 899 - DNA, 1147 bp, Piedraia hortai ATCC 24292
caagctgaaagccgagcgtgagcgtggtatcactatcgacattgccctctggaagttcgagactcccaagtactatgtcaccgtcattggtacgtcgcattatctcactcctcacagaagcacgctcctaacatcacacagacgctcccggtcaccgtgatttcatcaagaacatgatcactggtacctcccaggccgactgcgctatcctcattatcgctgccggtactggtgagttcgaggctggtatctccaaggatggccagactcgtgagcacgccctgctcgcctacaccctcggtgtgcgtcagctcatcgtcgccatcaacaagatggacaccaccaagtggtctgaggcccgttaccaggagatcatcaaggagacctccaacttcatcaagaaggtcggctacaaccccaagaccgtcgctttcgtccccatctctggcttcaacggcgacaacatgcttgccccctccaccaactgcccctggtacaagggatgggagcgtgaggtcaagggcaacaagcagaccggcaagaccctcctcgaggccattgacggcattgagccccccaagcgtccttccgacaagcccctccgtcttcctctccaggatgtttacaagatcggtggtatcggaactgttcctgtcggccgtatcgagactggtgtcctcaagcccggtatggtcgttaccttcgctcccgccaacgtcaccactgaagtcaagtccgtcgagatgcaccacgagcagctcactgagggtcttcccggtgacaacgtcggtttcaacgtgaagaacgtttccgtcaaggacatccgccgtggtaacgttgccagtgactccaagaacgaccccgctctgggtgccgcttctttcgacgcccaggtcatcgtcctcaaccaccccggtcaggtcggtgctggttacgccccggtcctcgattgccacactgcccacattgcttgcaagttctccgagatcaaggagaagatcgaccgccgtaccggcaagtctgttgaggacgcccccaagttcatcaagtctggtgactctgccatcgtcaagatggttccctccaagcccatgtgcgttgaggctttcaccgactaccctcctctgggccgtttcgccgtccgtga

SEQ ID NO: 900 - DNA, 1150 bp, Paecilomyces lilacinus ATCC 60735
ctcaaggccgagcgtgagcgtggtatcaccatcgacattgccctctggaagttcgagactcccaagtactatgtcaccgtcattggtacgtcgactcgcgcgagactggtcgcaatttccacgtcgctaacgtgcttgaacagacgctcccggccaccgtgacttcatcaagaacatgatcactggtacctcccaggctgactgcgctatcctcattatcgctgccggcactggtgagttcgaggctggtatctccaaggatggccagacccgtgagcacgctctgctcgcctacaccctcggtgttaagcagctcatcgtcgctatcaacaagatggacaccaccaagtggtctgaggcccgtttccaggagatcatcaaggagacctccaacttcatcaagaaggtcggctacaaccccaagaccgtcgctttcgtccccatctctggtttccacggcgacaacatgctttccccctccaccaactgcccctggtacaagggctgggagaaggagaccaaggctggcaagtccaccggcaagaccctccttgaggccatcgactccatcgagccccccaagcgccccagcgacaagcccctccgccttccccttcaggatgtgtacaagatcggcggtatcggcacagtccctgtcggccgtatcgagactggtgtcatcaagcccggcatggtcgtgaccttcgctccttccaacgtcaccaccgaagtcaagtccgttgagatgcaccacgagcagctctccgagggtgtccccggtgacaacgtcggcttcaacgtcaagaacgtctccgtcaaggagatccgtcgtggcaacgtcgccggtgactccaagaacgacccccctctgggtgccgcttctttcgatgcccaggtcatcgtcctcaaccaccccggccaggtcggtgctggctacgcccccgtcctcgactgccacaccgcccacattgcctgcaagttcgccgagatcaaggagaagatcgaccgccgtaccggcaagtctgtcgagtccgcccccaagttcatcaagtctggcgactctgccatcgtcaagatgattccctccaagcccatgtgcgttgaggctttcaccgactaccctcctctgggccgcttcgccgtccgtgac

SEQ ID NO: 901 - DNA, 751 bp, Paracoccidioides brasiliensis ATCC 32075
taccactaagtggtccgagacccgattcaatgaaattatcaaggaagtcaccaatttcattaagaaggtcggatataaccccaagactgttcctttcgttcccatttctggtttcgagggtgacaacatgatcgagccctctgccaactgcccatggtacaagggctggtccaaggagactgctcagggcaagtactctggcaagacccttcttgaggccatcgacgccattgagccccccacccgtcctaccgataaacctctccgtcttcccctccaggatgtctacaagatctccggtattggcactgttcctgtcggacgtgttgagactggagtcatcaagcccggtatggtcgtgaccttcgctcccgccaacgtcaccactgaagtcaagtccgtcgaaatgcaccaccagcagcttaccgccggtaaccccggtgacaacgtcggcttcaacgtcaagaatgtttccgtcaaagaagtccgccgtggtaacgttgccggtgactctaagaatgatcccccaaagggctgcgattccttcaatgcccaggtcatcgtcctcaaccaccctggtcaggttggcgctggttatgccccagtcctcgactgccatactgcccacattgcctgcaaattcgctgagctccttgagaagattgatcgacgaaccggaaagtctgttgagaacaaccccaagttcatcaagtccggtgatgctgctatcgtcaagatgattccttccaag

SEQ ID NO: 902 - DNA, 1056 bp, Sporothrix schenckii ATCC 7968
cgtgagcgcggtatcaccatcgatattgctctgtggaagttcgagacccccaagtactacgtcaccgtcattgacgcccccggtcatcgcgatttcatcaagaacatgatcactggtacctcgcaggccgactgcgccattctcatcattgccgctggtactggtgagttcgaggctggtatctccaaggatggccagactcgtgagcacgctctgctcgcctacaccctgggtgtgcggcagctgatcgtcgccatcaacaagatggacacggccaagtgggctgaggctcgttaccaggagatcatcaaggagacctccaacttcatcaagaaggtcggctacaaccccaagactgttgccttcgtccccatctcgggcttccacggcgacaacatgcttactccctcgaccaactgcccctggtacaagggctgggagaaggagggcaagagcggcaaggttaccggtaagactctgctggacgccattgacgccgtcgagccccccaagcgccccacggacaagcccctgcgtctgcccctccaggatgtctacaagatcggcggtatcggcactgtccctgtcggccgtatcgagactggtgtcctgaagcccggcatggtcgtcacctttgccccgtccaacgtcaccactgaagtcaagtccgtcgagatgcaccacgagcagcttgttgagggtgttcccggcgacaacgtcggcttcaacgtcaagaacgtctccgtcaaggagatccgtcgtggcaacgttgccggtgactccaagaacgaccccccctcgggcgccgccaccttcaacgcccaggtcattgtcctgaaccaccccggccaggtcggcaacggctacgccccggttctggactgccacaccgcccacattgcctgcaagttcaccgagatccttgagaagatcgaccgccgtaccggcaagtcggttgagaacaaccccaagttcatcaagtcgggtgacgccgccattgtcaagctgacgccctcgaagcccatgtgcgttgaggccttcactgactacccccct

SEQ ID NO: 903 - DNA, 1366 bp, Penicillium marneffei ATCC 58950
caaggctgagcgtgagcgtggtatcaccatcgatattgctctctggaagttccagactgccaagtacgaggttaccgtcattgacgcccccggtcaccgtgatttcatcaagaacatgatcactggtacctcccaggccgattgcgctattctcatcattgcctctggtactggtgaattcgaggctggtatctccaaggatggccagactcgtgagcacgctcttttggctttcaccctcggtgtccgtcagctcattgttgccctcaacaagatggacacttgcaagtggtctcagggtgagtactcgtacctgcgtttggccttgaatatcttactaatgcaccatagatcgttacaacgaaattgtcaaggagacttccaacttcatcaagaaggtcggatacaaccctaagaacgttcctttcgttcctatctccggtttcaacggtgacaacatgcttgagccctcccccaactgcccctggtacaagggttgggagaaggagaccaaggccggtaaggtcactggtaagaccctcctcgaggccatcgacgccattgagccccctacccgtcccgccaacaaggttagtccctcctcgactactcaaaccctcctcataagttcagattactgactcgttcacagcccctccgtcttcccctccaggatgtctacaagatcggtggtattggaacggttcccgtcggtcgtgttgagactggtaccatcgttcctggtatggttgtcaccttgtaagtcactctcctcgcttatcctacctgaaatcatcatgtgctaacttgacactcagcgctcccgccaacgtcaccactgaagtcaagagtgttgaaatgcaccaccagcagctcactgccggtcagcccggtgacaacgttggtttcaacgtgaagaacgtctccgtcaaggaaatccgtcgtggtaacgttgctggtgacagcaagaacgacccccctgccggtgctgcctccttcaacgcccaggtcatcgtcctcaaccaccccggtcaggtcggtgctggttacgccccagtcctcgattgccacactgcccacattgcttgcaagttcgctgagctcctcgagaagattgaccgtcgtaccggaaagtctgttgaggaccaccccaagttcatcaagtccggtgacgctgccatcgtcaagatgattccttccaagcccatgtgtgttgaggctttcaccgagtaccctcctctcggtcgtttcgccgttcgcgagtaagttttatctccgttgtctattttccatccttcccttctcctccgtcttccatatatattttttcagttatatgtgactaaccacaaatcacgggaatagc

SEQ ID NO: 904 - DNA, 841 bp, Curvularia lunata ATCC 26425
ctattatcgttgttgccgcttccgacggtcaaatgccccagactcgtgagcatctgctgctcgcccgccaggtcggtgtccagaagatcgttgtcttcgtcaacaaggtcgatgctgttgaggacaaggagatgttggagctcgtcgagatggagatgcgcgaattgctcagcagctacggcttcgagggcgacgagactcccatcatcatgggatctgccctctgcgccattgagggccgcgaacctgagattggtgtcaaccgaattgatgagctgctcgaggccgttgatacttggatccccacccctcagcgtgagaccgacaagcctttcctcatggccgtcgaggatgtcttctccattgctggtcgtggcactgtcgtctctggccgtgtcgagcgaggtatcctgaagcgcgatgctgaagttgagctcgtcggcaagggcaccgcccccatcaagaccaaggttaccgatatcgagaccttcaagaagtcctgcgaggagtctcgcgctggtgacaactccggtctccttcttcgtggtgtcaagcgtgatgaagtccgccgtggtatggtcgtttccgtccctggacaggtcaaggcgcacaagaagttccttgtctccatgtacgtgttgagcaaggaggaaggtggtcgtcacactggcttcggtgagaactacaggccgcaaatgttcatccgcactgccgacgagtcgtgtgccctgtactggccagaaggcaccgaggacgcccatgacaagcttgttatgcccggtgacaacgtcgagatggtttgcgagctccatgcaccacacgtcttggagcctggtcaacg

SEQ ID NO: 905 - DNA, 967 bp, Aspergillus niger ATCC 9508
cggtgctatcattgtcgtcgccgcctccgacggtcagatgtacgttaaccttaaaagaataactctccttcagtatatatgcttacactggcgatcaacaggccccagactcgtgagcacttgctgcttgctcgtcaggtcggtgtccagaagatcgttgtcttcgtcaacaaggtcgatgctatcgatgaccccgagatgctggagctcgttgagctggaaatgcgcgagcttctcagcacctacggattcgagggtgaggagacccccatcgtcttcggctctgctctctgcgccattgaggaccgccgccccgacatcggtaccgagcgtatcgacgctctcctcgaggccgttgacacctggatccccactccccagcgtgaccttgacaagcctttcttgatgtccattgaggaagttttctccatccccggtcgtggtaccgtcgcctccggccgtgtcgagcgtggtctcctgaagcgtgatagcgaggttgagatcatcggtaccaccaacgaggtcatcaagaccaaggttaccgacattgagaccttcaagaagtcctgctccgagtcccgcgccggtgacaactccggtctcctgctccgtggtgtccgccgtgaggatctccgccgtggtatggtcattgccgctcctggcagcgccaaggccaacagcaagttcatggtctccatgtacgtcctgaccgaggctgarggtggtcgccgtaccggtttcggtgtccagtaccgtccccagctgttcatccgcactgccggtaagtaaaattgcattctattccgctactagggaaccatctctaattctatttgctacagatgaggctgctgagttcagcttccccgacggagaccagtcccgccgtatcatgcccggtgacaacgtcgagatgatcgtcaagacccaccgccccgtcgccgccgaggccggtcagcgcttcaac

SEQ ID NO: 906 - DNA, 852 bp, Bipolaris hawaiiensis ATCC 26067
tggtgctattattgttgttgccgcttccgacggtcaaatgccccagactcgtgagcatctgctgctcgcccgtcaggtcggtgttcagaagatcgttgtcttcgttaacaaggtcgacgctgtcgaggacaaggagatgttggagcttgtcgagatggagatgcgcgaactgctcagcagctatggcttcgagggcgacgagacccctatcatcatgggttctgctctctgcgccattgaaggccgtcaacccgacattggtgtcgaacgaattgacgagctgctcgaggctgttgatacttggattcccacccctcagcgtgagaccgaaaagcctttcctcatggccgtcgaggatgtcttctccattgctggtcgtggtaccgtcgtctctggccgtgtcgaacgaggtatcctgaagcgcgatgctgaagttgagcttgtgggcaagggcagcgcacccatcaagaccaaggttaccgatatcgagaccttcaagaagtcttgcgaggagtcccgcgctggtgacaactccggtctccttcttcgtggtgttaagcgtgatgaagtccgccgtggtatggtcgtttccgtccctggacaggttaaggcgcacaagaagttccttgtctccatgtatgtgctgagcaaggaggaaggtggccgacacactggcttcggtgagaactacaggccgcaaatgttcatccgcactgccgacgagtcgtgtgccctgtactggccagaaggcaccgaggatgcccacgacaagcttgtcatgcccggtgacaacgtcgagatggtttgcgagctccatgcaccacacgtcttggagactggtcagcgcttcaa

SEQ ID NO: 907 - DNA, 966 bp, Aspergillus flavus ATCC 26947
ggtgctattgttgtcgttgctgcttcggatggtcatgatgtatggacaggccctttgctactgaatggtttcaagatctcgcgcttacacgtattataataggccccagacccgggagcacttgctgcttgcccgtcaggtcggtgtccagaagatcgtcgtttttgtcaacaagattgatgccgttgaggaccctgagatgttggagcttgtcgagttggaaatgcgcgagctccttagcagctacggcttcgagggcgaagagactcccatcatcttcggttctgctctgtgtgctttggaggaccgtcgccccgacattggtgccgagcgtatcgacgagctcatgaaggccgttgacacctggatccctacccctcagcgtgatcttgacaagcctttcctcatgtctgtcgaggaagtcttctccatcgccggtcgtggtaccgttgcctccggccgtgtcgaacgtggtatcctgaagaaggacagcgaagtcgagatcatcggaggtagcttcgatgctaccaagaccaaggtcaccgacattgagaccttcaagaagtcttgtgacgagtcccgcgctggtgacaactctggcttgcttctccgtggtatccgtcgtgaagacgtccgccgcggaatgatcattgctgctcctggcagcaccaaggcccacgaccagttcttggtgtccatgtacgttctcactgaggctgagggtggtcgtcgtactggcttcggctccaactaccgcccccaggtgttcgttcgcactgctggtaagtcaagccttttgctcacttaacggtattgattaagttctaactgttgtatcctagatgaggctgctgacctcagcttccccgacggtgatgagtcccggagggtgatgcctggtgacaacgtcgagatggtcctcaagactcaccgccccattgctgctgaggctggccagcgcttcaa

SEQ ID NO: 908 - DNA, 845 bp, Alternaria alternata ATCC 62099
ggtgctatcatcgtcgttgctgcttccgatggtcagatgccccagacccgtgagcacttgctgctcgcccgtcaggtcggtgttcagaagatcgttgtcttcgtcaacaaggtcgatgctgtcgaagacccggagatgttggaactcgtcgagatggagatgcgtgagttactcaccagctacggcttcgagggcgacgagacacccatcatcatgggttccgctctatgcgccatcgagggccgccagcccgagatcggtgttaccaaggtcgacgagctaatggacgctgtcgactcatggatccccacccctcagcgtgagaccgagaagcctttcctcatggctgttgaggatgtcttctcgattgctggacgtggtaccgtcgtttcgggccgtgtcgagcgcggtatcttgaagcgtgacgctgaagtcgagcttgtcggcaagggcaccgcgccaatcaagaccaaggtcactgatattgagaccttcaagaagtcgtgcgaggagtcgcgcgcgggtgataactccggtcttctcctccgtggtgtcaagcgtgatgacgttcgccgcggtatggttgtttccgttcccggacaagtcaaggctcacaagaagttccttgtctccatgtacgttctaagcaaagaggagggtggtcgtcacaccggcttcggcgagaactacaggccgcaaatgttcatccgaactgccgatgaatcctgcgcacttcacttcccagagggtaccgaggatgcgcacgacaagctagttatgcccggtgacaacgtcgagatggtctgcgaactccaccagccccacgttctagagaccggtcagcg

SEQ ID NO: 909 - DNA, 931 bp, Penicillium marneffei ATCC 64101; identical to SEQ ID NO: 505

SEQ ID NO: 910 - DNA, 931 bp, Penicillium marneffei ATCC 58950; identical to SEQ ID NO: 505

SEQ ID NO: 911 - DNA, 20 bp, Artificial Sequence
  Synthetic DNA Sequence
gacggmkkcatgccgcarac

SEQ ID NO: 912 - DNA, 20 bp, Artificial Sequence
  Synthetic DNA Sequence
gacggcgkcatgccgcarac

SEQ ID NO: 913 - DNA, 20 bp, Artificial Sequence
  Synthetic DNA Sequence
gacggysycatgcckcagac

SEQ ID NO: 914 - DNA, 21 bp, Artificial Sequence
  Synthetic DNA Sequence
gaaragctgcggrcgrtagtg

SEQ ID NO: 915 - DNA, 21 bp, Artificial Sequence
  Synthetic DNA Sequence
aaacgcctgaggrcggtagtt

SEQ ID NO: 916 - DNA, 20 bp, Artificial Sequence
  Synthetic DNA Sequence
gccgagctggccggcttcag

SEQ ID NO: 917 - DNA, 22 bp, Artificial Sequence
  Synthetic DNA Sequence
tcgtgctacccgtygccgccat

SEQ ID NO: 918 - DNA, 1391 bp, Escherichia coli strain J01672
agagaagcctgtcggcaccgtctggtttgcttttgccactgcccgcggtgaaggcattacccggcgggatgcttcagcggcgaccgtgatgcggtgcgtcgtcaggctactgcgtatgcattgcagaccttgtggcaacaatttctacaaaacacttgatactgtatgagcatacagtataattgcttcaacagaacatattgactatccggtattacccggcatgacaggagtaaaaatggctatcgacgaaaacaaacagaaagcgttggcggcagcactgggccagattgagaaacaatttggtaaaggctccatcatgcgcctgggtgaagaccgttccatggatgtggaaaccatctctaccggttcgctttcactggatatcgcgcttggggcaggtggtctgccgatgggccgtatcgtcgaaatctacggaccggaatcttccggtaaaaccacgctgacgctgcaggtgatcgccgcagcgcagcgtgaaggtaaaacctgtgcgtttatcgatgctgaacacgcgctggacccaatctacgcacgtaaactgggcgtcgatatcgacaacctgctgtgctcccagccggacaccggcgagcaggcactggaaatctgtgacgccctggcgcgttctggcgcagtagacgttatcgtcgttgactccgtggcggcactgacgccgaaagcggaaatcgaaggcgaaatcggcgactctcacatgggccttgcggcacgtatgatgagccaggcgatgcgtaagctggcgggtaacctgaagcagtccaacacgctgctgatcttcatcaaccagatccgtatgaaaattggtgtgatgttcggtaacccggaaaccactaccggtggtaacgcgctgaaattctacgcctctgttcgtctcgacatccgtcgtatcggcgcggtgaaagagggcgaaaacgtggtgggtagcgaaacccgcgtgaaagtggtgaagaacaaaatcgctgcgccgtttaaacaggctgaattccagatcctctacggcgaaggtatcaacttctacggcgaactggttgacctgggcgtaaaagagaagctgatcgagaaagcaggcgcgtggtacagctacaaaggtgagaagatcggtcagggtaaagcgaatgcgactgcctggctgaaagataacccggaaaccgcgaaagagatcgagaagaaagtacgtgagttgctgctgagcaacccgaactcaacgccggatttctctgtagatgatagcgaaggcgtagcagaaactaacgaagatttttaatcgtcttgtttgatacacaagggtcgcatctgcggcccttttgcttttttaagttgtaaggatatgccatgacagaatcaacatcccgtcg

SEQ ID NO: 919 - DNA, 23 bp, Artificial Sequence
  Synthetic DNA Sequence
  modified_base (3): i
  modified_base (6): i
  modified_base (12): i
  modified_base (15): i
  modified_base (18): i
ggnccngartcntmnggnaarac

SEQ ID NO: 920 - DNA, 23 bp, Artificial Sequence
  Synthetic DNA Sequence
  modified_base (3): i
  modified_base (9): i
  modified_base (12): i
  modified_base (15): i
  modified_base (18): i
  modified_base (20): i
tcnccvatntcnccntcnanytc

SEQ ID NO: 921 - DNA, 20 bp, Artificial Sequence
  Synthetic DNA Sequence
  modified_base (2): i
  modified_base (6): i
  modified_base (12): i
  modified_base (18): i
tnyrtngaygcngarcangc

SEQ ID NO: 922 - DNA, 23 bp, Artificial Sequence
  Synthetic DNA Sequence
  modified_base (9): i
  modified_base (12): i
  modified_base (15): i
  modified_base (18): i
  modified_base (21): i
taraayttnarngcnyknccncc

SEQ ID NO: 923 - DNA, 21 bp, Artificial Sequence
  Synthetic DNA Sequence
  modified_base (6): i
gacgcngccatcctgatgatc

SEQ ID NO: 924 - DNA, 21 bp, Artificial Sequence
  Synthetic DNA Sequence
acctcagtcgtcacgttggcg

SEQ ID NO: 925 - DNA, 20 bp, Artificial Sequence
  Synthetic DNA Sequence
aagcagatggttgtgtgctg

SEQ ID NO: 926 - DNA, 24 bp, Artificial Sequence
  Synthetic DNA Sequence
cagctgctcgtggtgcatctcgat

SEQ ID NO: 927 - DNA, 19 bp, Artificial Sequence
  Synthetic DNA Sequence
acgcggagaaggtgcgctt

SEQ ID NO: 928 - DNA, 22 bp, Artificial Sequence
  Synthetic DNA Sequence
ggtcgttcttcgagtcaccgca

SEQ ID NO: 929 - DNA, 448 bp, Bacteroides fragilis ATCC 25285
ttcagcatgccatttcaaaacaggccgaagccgatatcgtgattatcgctgcttgtggggagcgtgcaaatgaagttgtggaaatctttaccgaatttccggaattggtggacccgcacacgggacgtaagctgatggagcgtaccattattatcgcaaatacatcgaacatgccggtagcagcgcgtgaagcttctgtgtatacggccatgacgattgccgaatactatcgtgccatgggattgaaagtcctgctgatggcagactccacttcccgttgggcgcaggcattgcgtgagatgtcgaaccgtatggaggagttgcccggaccggatgcattcccgatggacctgtcctcaatcatttctaacttctatggccgtgcaggctacgtgaaactgaataacggcgagagcggttctattacctttatcggtacagtatcacc

SEQ ID NO: 930 - DNA, 438 bp, Bacteroides distasonis ATCC 8503
gctatctctaaacaagcggaagcggatatcgtgattatcgccgcctgcggtgagcgtgcgaatgaggtcgtagaggtatttacggagttcccggaattggtagacccgcatacgggacgtaaattgatggaacgtacgatcattatcgccaatacatccaacatgccggtagccgctcgtgaggcatccgtatatacggcgatgaccatcgccgagtattatcgcagcatgggtttgaaggttctgttgatggccgactctacttcccgctgggcacaggctttgcgtgagatgtccaaccgtttggaggagttgccgggaccggatgctttcccgatggacttgtccgctatcgtggcgaacttctacgctcgtgcgggattcgttcatttgaataacaacgctacaggctccgtcactttcatcggtacggtatcg

SEQ ID NO: 931 - DNA, 453 bp, Porphyromonas asaccharolytica ATCC 25260
cctccagcacgctatctctaagcaggcggaggctgatatcgtcattatggcagcctgcggtgagcgtgctaatgaggtggtggagatctttgccgagttccctgagctcgaagacccacacacgggacgcaagctgatggagcgtacgatcatcatcgctaacacgagtaacatgccagtggctgctcgtgaggcttcggtctacaccgctatgaccatcgctgagtactaccgctcgatgggtctcaaagtactcctaatggctgactcgacctctcgctgggcacaggcactgcgtgagatgtctaaccgtctagaggagctgcctggaccagatgcattcccgatggacttgtcggctatcgtggcaaacttctacgctcgtgccggcttcgtctatctcaacaacggtgagacaggttctgtaaccttcatcggtacggtctctccagc

SEQ ID NO: 932 - DNA, 835 bp, Listeria monocytogenes ATCC 15313
cggagctatcttagtagtatctgctgctgatggcccaatgccacaaactcgtgaacatatcttactttcacgtcaagttggtgttccatacatcgttgtattcatgaacaaatgtgacatggttgacgatgaagaattactagaattagttgaaatggaaattcgtgatctattaactgaatatgaattccctggcgatgacattcctgtaatcaaaggttcagctcttaaagcacttcaaggtgaagctgactgggaagctaaaattgacgagttaatggaagctgtagattcttacattccaactccwgaacgtgatactgacaaaccattcatgatgccagttgaggatgtattctcaatcactggtcgtggaacagttgcaactggacgtgttgaacgtggacaagttaaagttggtgacgaagtagaagttatcggtatcgaagaagaaagcaaaaaagtagtagtaactggagtagaaatgttccgtaaattactagactacgctgaagctggcgacaacattggcgcacttctacgtggtgttgctcgtgaagatatccaacrtggtcaagtattagctaaaccaggttcgattactccacacactaacttcaaagctgaaacttatgttttaactaaagaagaaggtggacgtcacactccattcttcaacaactaccgcccacaattctatttccgtactactgacgtaactggtattgttacacttccagaaggtactgaaatggtaaygcctggtgataacattgagcttgcagttgaactaattgcaccaatcgctatcgaagacggtactaaattctctatc

SEQ ID NO: 933 - DNA, 24 bp, Artificial Sequence
  Synthetic DNA Sequence
  modified_base (10): i
catcatcgtnttcmtgaacaartg

SEQ ID NO: 934 - DNA, 24 bp, Artificial Sequence
  Synthetic DNA Sequence
  modified_base (21): i
tcacgyttrrtaccacgcagnaga

SEQ ID NO: 935 - DNA, 23 bp, Artificial Sequence
  Synthetic DNA Sequence
  modified_base (3): i
  modified_base (9): i
  modified_base (15): i
ggnaarwsncarytntgycayac

SEQ ID NO: 936 - DNA, 20 bp, Artificial Sequence
  Synthetic DNA Sequence
  modified_base (3): i
  modified_base (5): i
  modified_base (9): i
  modified_base (12): i
  modified_base (18): i
tcnsnytcnggnarrcangg

SEQ ID NO: 937 - DNA, 23 bp, Artificial Sequence
  Synthetic DNA Sequence
  modified_base (3): i
  modified_base (6): i
  modified_base (12): i
  modified_base (18): i
atnacngargynttyggngartt

SEQ ID NO: 938 - DNA, 20 bp, Artificial Sequence
  Synthetic DNA Sequence
  modified_base (3): i
  modified_base (6): i
  modified_base (9): i
  modified_base (12): i
  modified_base (18): i
cyngtngynswngcrtgngc

SEQ ID NO: 939 - DNA, 1203 bp, Saccharomyces cerevisiae
atgtctcaagttcaagaacaacatatatcagagtcacagcttcagtacgggaacggttcgttgatgtccactgtaccagcagacctttcacagtcagtcgttgatggaaacggcaacggtagcagcgaagatattgaggccaccaacggctccggcgatggtggcggattgcaggagcaagcggaagcgcaaggtgaaatggaggatgaagcatacgatgaagctgccttaggttcgtttgtgccaatagaaaaactgcaagtgaacgggattactatggcggatgtgaaaaaactaagggagagtgggcttcacactgctgaagcggtagcatatgctcccagaaaggatttattggaaatcaaaggtatatcggaagctaaggcagataagttgctaaacgaagcggcaaggctagtgcctatgggatttgtcacggctgctgattttcatatgagaagatcggagctgatttgtttgacaacgggttctaagaatttggacactcttttgggtggtggtgtggaaactggttctattactgagcttttcggtgaattcaggacaggtaagtcccagctatgtcacactttggccgtgacatgccaaattccattggatattggtggcggtgaaggtaagtgtttgtatatcgataccgaaggtactttcaggccggtaagattggtatccatagctcagcggttcggattagacccggatgatgctttgaacaacgttgcgtatgcaagagcctataacgccgatcatcagttaagacttctggatgctgctgcccaaatgatgagcgagtctcggttttccttgattgtggtcgattctgttatggctctataccgtacggatttttctggtcgtggtgaactaagcgcaaggcaaatgcatttagccaaatttatgcgtgctttgcaaaggctggccgaccaatttggtgttgcagtcgtcgttactaaccaagtggtcgcccaagttgatggtggtatggcttttaatccagatccaaagaagcctatcggtggtaatattatggcacattcttccaccacgcgattaggtttcaaaaagggtaagggatgtcaaagattatgcaaagttgttgactcaccttgcttaccagaggctgaatgtgtgttcgcgatctatgaagatggtgttggtgaccccagagaagaagacgagtag

SEQ ID NO: 940 - DNA, 1800 bp, Saccharomyces cerevisiae strain GRF88
cgatccaattgctggtcttaagatgcatttgattgatctaggtattgccactgaagctgaagtcaaagcttacgacaagtccgctagaaaatacgttgacgaacaagttgaattagctgatgctgctcctcctccagaagccaaattatccatcttgtttgaagacgtctacgtgaaaggtacagaaactccaaccctaagaggtaggatccctgaagatacttgggacttcaaaaagcaaggttttgcctctagggattaattaaatcgtaaggaaaaataaaataatagtgctgtgatcgcatgatattcttccctggaagcgccattttatagcaagaaatgtaagtcaagtatattttaactgtatatacaacaatatgactcttttttatgccttgttgtttttcttcgggttttcccacacattgtgtggagagatagttattaacagaccgaaaatagccgcccaaggataaacttttatataaagggaagggtagttgacccaaaaatttggattctactttccagatttactttcacccttttatatttgctgtagtctgttatgccaatcaggaaagcatttgaacaaatatgtctgttacaggaactgagatcgatagtgatacagcaaaaaatattcttagtgtagatgaattacagaactatggtattaatgcctcagatcttcaaaaattgaagtctggtgggatatacacagtcaatgtatgttataataacatttttaaaacctctgctgtagaggttctttccccctttcttttactaactaataatttggaaaggaacttttatagaccgttttgtcaacaacaagaagacatctatgtaaaattaaagggttaagtgaggtgaaagtggaaaaaattaaagaagctgctggaaaaatcatacaggtgggatttatccccgctactgtacaattagatataagacagcgtgtgtactccttatcaactggatctaagcaactagattcaatcctaggtggtggaataatgacaatgagtatcactgaagtatttggtgaatttaggtgtggtaagacacagatgtctcatactttgtgtgttaccacgcagcttccgagggaaatgggtggtggtgaagggaaagtagcatatattgatacagaaggcactttcaggcccgagaggattaagcaaattgcagaaggttatgaattggatcccgagtcatgtttggcaaacgtttcatatgctagagccttgaatagtgaacatcaaatggaacttgttgaacaattgggtgaagaacttagttctggagattatcgccttatcgtggtagattctataatggcaaacttcagagtagactactgcggtagaggtgaactaagcgaaagacagcaaaagctaaatcaacatcttttcaaattgaatagattggcagaggaatttaatgttgcagtatttctgacaaaccaagttcaatcagacccaggtgcttctgcattatttgcctcggcagatggtaggaaaccaattggagggcacgttctggcacatgcgtcagcaacaaggattttgttgagaaaagggcgtggtgacgaaagagttgccaagttacaagattccccagatatgcctgaaaaagaatgtgtctacgtaattggtgaaaaaggtattaccgattcaagtgactagtttttgtatacttttttaatgaagatgacattgctcctttattaaacttttcttttactttgtgttactaatattattaatatcttgttatgattctttgttt

SEQ ID NO: 941 - DNA, 430 bp, Cryptococcus humicolus ATCC 38294
cgtccttatccaggagctcattaacaacattgccaaggcccacggtggtttctccgtcttcaccggtgtcggtgagcgtacccgtgagggtaacgacctgtaccacgagatgcgtgagactggtgtcatcaacctcgagggcgactccaaggtcgctctcgtcttcggccagatgaacgagccccccggagcccgtgcccgtgtcgcccttaccggcctcaccatcgccgagtacttccgtgacgaggagggtcaggacgtgcttctcttcatcgacaacattttccgtttcacccaggccggttccgaggtgtctgcccttctcggtcgtatcccctcggccgtcggttaccagcccaccctcgctaccgacatgggttccatgcaggagcgtatcaccaccaccaagaagggttcgattacctccgtc

SEQ ID NO: 942 - DNA, 794 bp, Escherichia coli ATCC 43895
cgtgtacgatgctcttgaggtgcaaaatggtaatgagcgtctggtgctggaagttcagcagcagctcggcggcggtatcgtgcgtaccatcgcaatgggttcctccgacggtctgcgtcgcggtctggatgtaaaagacctcgaacacccgatcgaagtcccggtaggtaaagcgactctgggccgtatcatgaacgtactgggtgaaccggtcgacatgaaaggcgagatcggtgaagaagagcgttgggcgattcaccgcgcagcaccttcctacgaagagctgtcaaactctcaggaactgctggaaaccggtatcaaagttatcgacctgatgtgtccgttcgctaagggcggtaaagttggtctgttcggtggtgcgggtgtaggtaaaaccgtaaacatgatggagctcattcgtaacatcgcgatcgagcactccggttactctgtgtttgcgggcgtaggtgaacgtactcgtgaggggaacgacttctaccacgaaatgaccgactccaacgttatcgataaagtatccctggtgtatggccagatgaacgagccgccgggaaaccgtctgcgcgtagctctgaccggtctgaccatggctgagaaattccgtgacgaaggtcgtgacgttctgctgttcgttgacaacatctatcgttacaccctggccggtacggaagtatccgcactgctgggccgtatgccttcagcggtaggttatcagccgaccctggcggaagagatgggcgttctgcaggaacgtatcacctccaccaaaaccggtt

SEQ ID NO: 943 - DNA, 814 bp, Escherichia coli ATCC 35401
atgccgtaccgcgcgtgtacgatgctcttgaggtgcaaaatggtaatgagcgtctggtgctggaagttcagcagcagctcggcggcggtatcgtacgtaccatcgcaatgggttcctccgacggtctgcgtcgcggtctggatgtaaaagacctcgaacacccgattgaagtcccggtaggtaaagcgactctgggccgtatcatgaacgtactgggtgaaccggtcgacatgaaaggcgagatcggtgaagaagagcgttgggcgattcaccgcgcagcaccttcctacgaagagctgtcaaactctcaggaactgctggaaaccggtatcaaagttatcgacctgatgtgtccgttcgctaagggcggtaaagttggtctgttcggtggtgcgggtgtaggtaaaaccgtaaacatgatggagctcattcgtaacatcgcgatcgagcactccggttactctgtgtttgcgggcgtaggtgaacgtactcgtgagggtaacgacttctaccacgaaatgaccgactccaacgttatcgacaaagtatccctggtgtatggccagatgaacgagccgccgggaaaccgtctgcgcgttgctctgaccggtctgaccatggctgagaaattccgtgacgaaggtcgtgacgttctgctgttcgttgacaacatctatcgttacaccctggccggtacggaagtatccgcactgctgggccgtatgccttcagcggtaggttatcagccgaccctggcggaagagatgggcgttctgcaggaacgtatcacctccaccaaaactggttctatcac

SEQ ID NO: 944 - DNA, 798 bp, Escherichia coli ATCC 11775
gtgtacgatgctcttgaggtgcaaaatggtaatgagcgtctggtgctggaagttcagcagcagctcggcggcggtatcgtgcgtaccatcgcaatgggttcctccgacggtctgcgtcgcggtctggatgtaaaagacctcgaacacccgatcgaagtcccggtaggtaaagcgactctgggccgtatcatgaacgtactgggtgaaccggtcgacatgaaaggcgagatcggtgaagaagagcgttgggcgattcaccgcgcagcaccttcctacgaagagctgtcaaactctcaggaactgctggaaaccggtatcaaagttatcgacctgatgtgtccgttcgctaagggcggtaaagttggtctgttcggtggtgcgggtgtaggtaaaaccgtaaacatgatggagcttattcgtaacatcgcgatcgagcactccggttactctgtgtttgcgggcgtaggtgaacgtactcgtgagggtaacgacttctaccacgaaatgaccgactccaacgttatcgacaaagtatccctggtgtatggccagatgaacgagccgccgggaaaccgtctgcgcgttgctctgaccggtctgaccatggctgagaaattccgtgacgaaggtcgtgacgttctgctgttcgttgacaacatctatcgttacaccctggccggtacggaagtatccgcactgctgggccgtatgccttcagcggtaggttatcagccgaccctggcggaagagatgggcgttctgcaggaacgtatcacctccaccaaaaccggttctatc

SEQ ID NO: 945 - DNA, 812 bp, Escherichia coli ATCC 25922
atgccgtaccgcgcgtgtacgatgctcttgaggtgcaaaatggtaatgagcgtctggtgctggaagttcagcagcagctcggcggcggtatcgtgcgtaccatcgcaatgggttcctccgacggtctgcgtcgcggtctggatgtaaaagacctcgaacacccgatcgaagtcccggtaggtaaagcgactctgggccgtatcatgaacgtactgggtgaaccggtcgacatgaaaggcgagatcggtgaagaagagcgttgggcgattcaccgcgcagcaccttcctacgaagagctgtcaaactctcaggaactgctggaaaccggtatcaaagttatcgacctgatgtgtccgttcgctaagggcggtaaagttggtctgttcggtggtgcgggtgtaggtaaaaccgtaaacatgatggagcttattcgtaacatcgcgatcgagcactccggttactctgtgtttgcgggcgtaggtgaacgtactcgtgagggtaacgacttctaccacgaaatgaccgactccaacgttatcgacaaagtatccttggtgtatggccagatgaacgagccgccgggaaaccgtctgcgcgttgctctgaccggtctgaccatggctgagaaattccgtgacgaaggtcgtgacgtattgctgttcgtcgataacatctatcgttacaccctggccggtaccgaagtatccgcactgctgggccgtatgccttcagcggtaggttatcagccgaccctggcggaagagatgggcgttctgcaggaacgtatcacctccaccaaaaccggttctatc

SEQ ID NO: 946 - DNA, 832 bp, Neisseria polysaccharea ATCC 43768
gcgacgctatcccgcatgtttacgatgccctgaaattggacgagaacggtctgactctggaagttcaacaacttctgggtgacggcgttgtccgtactattgcaatgggtagttcagacggcctgaaacgcggcatgtctgtaagcaatactggtgcgccaatcactgtgccggtaggtaaaggtactttgggtcgtattgtcgacgtattgggtacgcctgttgatgaagcaggtccgatcgataccgacaagagccgtgccattcaccaaactgctccgaaattcgacgagttgtctgcaactaccgaattgttggaaaccggtattaaagtgatcgacttgctgtgtccgtttgctaaaggcggtaaagtaggtctgttcggtggtgccggtgtaggcaaaaccgtgaacatgatggaattgatcaacaacatcgccaaagcgcacagcggtctgtccgtgttcgcaggtgtgggcgagcgtacccgtgaaggtaacgacttctaccacgagatgaaagattccaacgtattggataaagtggcaatggtttacggtcagatgaacgaacctccgggcaaccgtttgcgcgtcgcattgaccggtttgaccatggcggaatacttccgtgacgaaaaagacgaaaacggtaaaggtcgcgacgtattgttcttcgttgacaacatctaccgttacactctggccggtaccgaagtatctgcactgttgggccgtatgccttctgcagtgggttaccaaccgacattggctgaagaaatgggtcgtttgcaagagcgtattacctctacccaaaccggttccattacttc

SEQ ID NO: 947 - DNA, 840 bp, Neisseria sicca ATCC 9913
tccgcgcgatgccattccgcatgtttacgacgccctgaaattggatgcaaacggcctgactttggaagtacaacagcttctgggcgacggcgtggttcgtactattgcaatgggtagttcggacggtctgaaacgcggcatgactgtaagcaatacagatgcgccgattactgtgccggtaggtaaaggtactttgggacgtattgtcgatgtgttgggtacacctgttgatgaagcaggtccgattgataccgacaaacaccgtgctatccatcagacagctccgaaattcgatgagttgtctgctactaccgagctgctggaaacaggcattaaagtgattgacttgctgtgtccgtttgccaaaggcggtaaagtaggtctgttcggtggtgccggtgtaggcaaaaccgtcaacatgatggaattgattaacaacatcgccaaagcgcatagtggtttgtccgtgttcgccggtgtgggggaacgtacccgtgaaggtaacgacttctaccacgagatgaaagattccaacgtattggacaaagtggcgatggtttacggtcagatgaacgaacctccgggtaaccgtctgcgtgtagccttgaccggtttgacgatggccgaatacttccgtgatgaaaaagacgaaagcggcaaaggtcgcgacgtattgttcttcgtggacaacatttaccgttacactctggccggtacagaagtatccgcattgctcggtcgtatgccttcagcagtaggttaccaaccgacattggctgaagaaatgggtcgtctgcaagagcgtattaccctctactcaaacaggctccattacttcta

SEQ ID NO: 948 - DNA, 843 bp, Streptococcus mitis ATCC 903
gcagctggcgacaagctacctgagatcaataatgcacttgtagtctataaaaatgacgaaaaaaaatcaaaaatcgtccttgaagtagctcttgagcttggtgatggagtggttcggaccatcgctatggaatcaacggatgggttgactcgtggcatggaagtgctagatactggccgtccaatttctgtgccagtcggcaaagaaacacttggtcgcgtctttaacgttttgggagataccattgacttggatgctccttttgcggatgatgcagagcgccagccaatccataagaaagctccaacctttgatgagttgtctacttcttcagagatcttagagacaggtatcaaggttatcgacctgttagccccttatctgaaaggtggtaaagttggactcttcggtggtgccggagttggtaagaccgtcctgattcaagaattgatccacaacattgcccaagaacacggtggtatttctgtatttactggcgttggggaacgtacccgtgaagggaatgacctttattgggaaatgaaagagtctggtgttatcgagaaaacagccatggtcttcggtcagatgaatgagccgccaggagcgcgtatgcgggttgctttgactggtttgacgattgcagaatacttccgtgatgtggaaggtcaagatgtcttgctcttcattgacaacatcttccgtttcacgcaggcaggttctgaagtttctgcccttttgggtcggatgccgtcagccgttggttaccaaccaacacttgcgacagaaatggggcaattgcaagagcgtatcacatcgactaagaagggttctgtaacctct

SEQ ID NO: 949 - DNA, 841 bp, Streptococcus mitis ATCC 49456
gcagcaggggaaaaacttcctgagattaacaatgcacttgtcgtctacaaaaatgacgaaagaaaaacaaaaatcgtccttgaagtagccttggagttgggagatggtatggtccgtactatcgccatggaatcaacagatggtttgactcgtggaatggaagtattggacacaggtcgtccaatctctgtaccagtaggtaaagaaactttgggacgtgtcttcaatgttttgggagataccattgacttggaagctccttttacagaagatgcagagcgtcagccaattcataaaaaagctccaacttttgatgaattgtctacctcttctgaaatccttgaaacagggattaaggttatcgaccttcttgccccttaccttaaaggtggtaaggttggacttttcggtggtgccggagttggtaaaaccgtcttaatccaagaattgattcacaacattgcccaagaacacggtggtatttcagtatttaccggtgttggggaacgtactcgtgagggtaatgacctttactgggaaatgaaagaatcaggtgttatcgagaaaacagccatggtatttggtcagatgaatgagccgccaggagcacgtatgcgtgttgccctaactggtttgacaatcgccgaatacttccgtgatgtggaaggccaagacgtgcttctctttatcgataatatcttccgtttcactcaggctggttcagaagtatctgcccttttgggtcgtatgccatcagccgttggttaccaaccaacacttgctacggaaatgggtcaattgcaagagcgtattacatcaactaaaaagggttctgtaacct

SEQ ID NO: 950 - DNA, 827 bp, Streptococcus mitis strain LSPQ 2583
gctacctgagatcaataatgcacttgtagtctataaaaatgacgaaaataaatcaaaaatcgtccttgaagtagctcttgagcttggtgatggagtggttcggaccatcgctatggaatcaacggatgggttgactcgtggcatggaagtgctagatactggtcgtccaatttctgtgccagtcggcaaagaaacacttggtcgcgtctttaacgttttgggagataccattgacttggatgctccttttgcggatgatgcagagcgccagccaatccataagaaagctccaacctttgatgagttgtctacttcatcagagatcttagagacaggtatcaaggttatcgacctgttagcaccttatctgaaaggtggtaaagtcggactcttcggtggtgccggagttggtaagaccgtcctgattcaggaattgatccacaacattgcccaagagcatggtggtatttccgtgtttaccggtgttggggaacgtacccgtgaagggaatgacctttactgggaaatgaaggagtctggcgttatcgagaaaacagccatggtcttcggtcagatgaatgagccaccaggagcgcgtatgcgggttgctttgactggtttgacgattgcagagtacttccgtgatgtagaaggtcaagatgtcttgctcttcattgacaacatcttccgtttcacgcaggcaggttctgaagtctctgcccttttgggtcggatgccatcagccgttggttaccaaccaacacttgcgactgaaatgggacaactccaagagcgtattacatcgactaagaaaggttctgtaactt

SEQ ID NO: 951 - DNA, 844 bp, Streptococcus oralis ATCC 35037
gcagcaggggaaacacttcctgagattaataatgcacttgtcgtctacaaaaatgacgaaagaaaaacaaaaatcgtccttgaagtagccttggagttgggtgatggtatggtccgtacgatcgccatggaatcaacagatggtttgactcgtggaatggaagttttggacacaggccgtccaatctctgtaccagtaggtaaagaaactttgggacgtgtcttcaacgttttgggagatactattgacttggatgctcctttcgctgaagacgctgagcgtcagccaattcataagaaagctccaacttttgatgaattgtctacctcatctgaaatcttggaaacagggattaaggttatcgaccttcttgccccttaccttaaaggtgggaaagttggactcttcggtggtgccggagttggtaaaactgtcttgatccaagagttgattcacaacattgcccaagaacatggtggtatttcagtatttaccggtgttggagaacgtacccgtgaggggaacgacctttactgggaaatgaaagaatcaggcgttatcgagaaaacagccatggtatttggtcagatgaatgagccacctggagcacgtatgcgtgttgctcttactggtttgacaatcgccgaatacttccgtgatgtagaaggccaagatgtgcttctctttatcgacaatatcttccgtttcactcaagctggttcagaagtatctgcccttttgggtcggatgccttcagccgttggttaccaaccaacacttgctacggaaatgggtcaattgcaagaacgtatcacatcaactaagaagggttctgtaacctcta

SEQ ID NO: 952 - DNA, 830 bp, Streptococcus pneumoniae strain StrR-06
gcagcaggggaaaaacttcctgagattaacaatgcacttgtcgtctacaaaaatgacgaaagaaaaacaaaaatcgtccttgaagtagccttggagttaggagatggtatggttcgtactatcgccatggaatcaacagatgggttgactcgtggaatggaagtattggacacaggtcgtccaatctctgtaccagtaggtaaagaaactttgggacgtgtcttcaacgttttgggagataccattgatttggaagctccttttacagaagacgcagagcgtcagccaattcataaaaaagctccaacttttgatgagttgtctacctcttctgaaatccttgaaacagggatcaaggttattgaccttcttgccccttaccttaaaggtggtaaagttggacttttcggtggtgccggagttggtaaaaccgtcttaatccaagaattgattcacaacattgcccaagagcacggtggtatttcagtatttactggtgttggggaacgtactcgtgaggggaatgacctttactgggaaatgaaagaatcaggcgttatcgagaaaacagccatggtctttggtcagatgaatgagccaccaggagcacgtatgcgtgttgcccttactggtttgacaatcgctgaatacttccgtgatgtggaaggccaagacgtgcttctctttatcgataatatcttccgtttcactcaggctggttcagaagtatctgcccttttgggtcgtatgccatcagccgttggttaccaaccaacacttgctacggaaatgggtcaattgcaagaacgtatcacatcaaccaagaaggg

SEQ ID NO: 953 - DNA, 823 bp, Streptococcus pneumoniae strain StrR-11
aaaaacttcctgagattaacaatgcacttgtcgtctacaaaaatgacgaaagaaaaacaaaaatcgtccttgaagtagccttggagttaggagatggtatggttcgtactatcgccatggaatcaacagatgggttgactcgtggaatggaagtattggacacaggtcgtccaatctctgtaccagtaggtaaagaaactttgggacgtgtcttcaacgttttgggagataccattgatttggaagctccttttacagaagacgcagagcgtcagccaattcataaaaaagctccaacttttgatgagttgtctacctcttctgaaatccttgaaacagggatcaaggttattgaccttcttgccccttaccttaaaggtggtaaagttggacttttcggtggtgccggagttggtaaaaccgtcttaatccaagaattgattcacaacattgcccaagagcacggtggtatttcagtatttactggtgttggggaacgtactcgtgaggggaatgacctttactgggaaatgaaagaatcaggcgttatcgagaaaacagccatggtctttggtcagatgaatgagccaccaggagcacgtatgcgtgttgcccttactggtttgacaatcgctgaatacttccgtgatgtggaaggccaagacgtgcttctctttatcgataatatcttccgtttcactcaggctggttcagaagtatctgcccttttgggtcgtatgccatcagccgttggttaccaaccaacacttgctacggaaatgggtcaattgcaagaacgtatcacatcaactaagaagggttc

SEQ ID NO: 954 - DNA, 844 bp, Streptococcus pneumoniae strain StrR-55
gcagcaggggaaaaacttcctgagattaacaatgcacttgtcgtctacaaaaatgacgaaagaaaaacaaaaatcgtccttgaagtagccttggagttaggagatggtatggttcgtactatcgccatggaatcaacagatgggttgactcgtggaatggaagtattggacacaggtcgtccaatctctgtaccagtaggtaaagaaactttgggacgtgtcttcaacgttttgggagataccattgacttggaagctccttttacagaagacgcagagcgtcagccaattcataaaaaagctccaacttttgatgagttgtctacctcttctgaaatccttgaaacagggatcaaggttattgaccttcttgccccttaccttaaaggtggtaaagttggacttttcggtggtgccggagttggtaaaactgtcttaatccaagaattgattcacaacattgcccaagagcacggtggtatttcagtatttgctggtgttggggaacgtactcgtgaggggaatgacctttactgggaaatgaaagaatcaggcgttatcgagaaaacagccatggtctttggtcagatgaatgagccaccaggagcacgtatgcgtgttgcccttactggtttgacaatcgctgaatacttccgtgatgtggaaggccaagacgtgcttctctttatcgataatatcttccgtttcactcaggctggttcagaagtatctgcccttttgggtcgtatgccatcagccgttggttaccaaccaacacttgctacggaaatgggtcaattgcaagaacgtatcacatcaaccaagaagggttctgtaacctcta

SEQ ID NO: 955 - DNA, 834 bp, Streptococcus pneumoniae strain StrR-05
aaaaacttcctgagattaacaatgcacttgtcgtctacaaaaatgacgaaagaaaaacaaaaatcgtccttgaagtagccttggagttaggagatggtatggttcgtactatcgccatggaatcaacagatgggttgactcgtggaatggaagtattggacacaggtcgtccaatctctgtaccagtaggtaaagaaactttgggacgtgtcttcaacgttttgggagataccattgatttggaagctccttttacagaagacgcagagcgtcagccaattcataaaaaagctccaacttttgatgagttgtctacctcttctgaaatccttgaaacagggatcaaggttattgaccttcttgccccttaccttaaaggtggtaaagttggacttttcggtggtgccggagttggtaaaaccgtcttaatccaagaattgattcacaacattgcccaagagcacggtggtatttcagtatttactggtgttggggaacgtactcgtgaggggaatgacctttactgggaaatgaaagaatcaggcgttatcgagaaaacagccatggtctttggtcagatgaatgagccaccaggagcacgtatgcgtgttgcccttactggtttgacaatcgctgaatacttccgtgatgtggaaggccaagacgtgcttctctttatcgataatatcttccgtttcactcaggctggttcagaagtatctgcccttttgggtcgtatgccatcagccgttggttaccaaccaacacttgctacggaaatgggtcaattgcaagaacgtatcacatcaaccaagaagggttctgtaacctcta

SEQ ID NO: 956 - DNA, 495 bp, Babesia microtti strain Persing-1
ttgtatatcacaggcactcagcaaatattccgatactgacgtaattatatacgtgggttgtggtgaacgtgggaatgaaatggctgagattctatgcgaattccctgaactatctactgtagttaatgatgaaaaggtggccattatggaacgtacatgcttagttgccaatacttctaatatgccagtggccgctagagaagctagtatatacactggtattacaattgctgaatatttccgtgatatgggttacaactgcactcttatggccgattccactagccgatgggcagaggctctaagggaaatttctggtagattggctgaaatgcctgcagattctggctatccggcctatttatcgtcaaggttgtcagctttttatgaacgtgcaggtgggataactgtctaattaatttaggcttgattaagtgcttaggttcaccaacacgaaccggatctattacggttgtaggagcagtttctccacca

SEQ ID NO: 957 - DNA, 469 bp, Entamoeba histolytica strain HM1-1MSS
agttatttcacaagcattaagtaaatatagtaattcagatgttattatttatgtaggatgtggtgaacgaggaaatgaaatggcagaagttcttcgagattttccagctctttctattaaagtaggagataaagaagaatctattatgacaagaacagcacttgttgctaatacatctaatatgcctgttgcagcacgtgaagcatcaatttatactggaattacattatcagaatattatagagatatgggatataatgttgctatgatggcagattcaacatcaagatgggctgaagcacttagagaaatttcaggacgtcttgcagaaatgccagctgattctggatatccagcatatcttgcagcacgtttagcatcattttatgaacgtgcaggtatggttgaatgtttaggatcaccaaaaagaatagggtcagtttctattgtaggagctgtttcaccacct

SEQ ID NO: 958 - DNA, 452 bp, Fusobacterium nucleatum subsp. polymorphum ATCC 10953
tacaacaccaacttgctaaatgggcagatgcagaagtagttgtttatgttggttgtggggaacgtggaaatgaaatgaccgatgtacttatggaattcccagaaattattgaccctaagacaggacaatctttaatgaagagaacagttcttatagctaatacttctaatatgccagttgctgctcgtgaggcttcaatctatactggtataactattgcagaatattttagagatatgggatattcagtggcacttatggcagattcaacaagtcgttgggcagaagcacttcgtgaaatgtcaggacgtttggaagaaatgccaggtgatgaaggatatccagcatatctatcaagtagaatagcagagttttatgaaagagcagggcttgttgaatgtctaggtaatggagaagaaggagcattaactgtaattggagcagtatctcca

SEQ ID NO: 959 - DNA, 469 bp, Leishmania aethiopica ATCC 50119
tgtaattagtcaggccctctccaagtactccaactccgactgcgtcatctatgtcggctgcggcgagcgcggtaatgagatggccgaggtgctcatggagttcccgaccctgacgaccgtgatcaatggtcgcgaggagtcgatcatgaagcgcacctgcctcgtggcgaacacttcgaacatgccagtcgcagcccgtgaggcctctatttacaccggcatcaccctggccgagtactaccgtgatatgggcaagcatatcgccatgatggccgactcgacgtctcgctgggccgaggcgcttcgtgagatttcgggtcgtctggcggagatgccggccgatggtggctaccctgcctatctcagcgctcgtctcgcctccttctacgagcgcgccggcctcgtcacctgcatcggcgggccgaagcgccagggctccgtcacgattgtcggtgccgtgtctccgccg

SEQ ID NO: 960 - DNA, 469 bp, Leishmania tropica ATCC 30815
tgtaattagtcaggccctctccaagtactccaactccgactgcgtcatctatgtcggctgcggcgagcgcggtaatgagatggccgaggtgctcatggagttcccgaccctgacgaccgtgatcgatggtcgcgaggagtcgatcatgaagcgcacctgcctcgtggcgaacacttcgaacatgccagtcgcagcccgtgaggcctctatttacaccggcatcaccctggccgagtactaccgtgatatgggcaagcatatcgccatgatggccgactcgacgtctcgctgggccgaggcgcttcgtgagatttcgggtcgtttggcggagatgccggccgatggtggctaccctgcctatctcagcgctcgtctcgcctccttctacgagcgcgccggcctcgtcacctgcatcggcgggccgaagcgccagggctccgtcacgattgtcggtgccgtgtctccgccg

SEQ ID NO: 961 - DNA, 469 bp, Leishmania guyanensis ATCC 50126
tgtcatcagtcaggccctctccaagtactccaactcggactgtgtcatctatgtcggctgcggtgaacgcggtaacgagatggccgaggtgctcatggagttcccgaccctgacgactgtgatcgatggtcgcgaagagtccatcatgaagcgcacctgcctcgtggcgaacacctcgaacatgcccgtcgcagcccgtgaggcctctatttataccggcatcacccttgctgagtactaccgtgatatgggcaagcacattgccatgatggccgactcgacgtctcgctgggccgaggcgctgcgtgagatttcgggtcgattggcggagatgccggctgatggtggctaccctgcctacctcagcgcccgcctcgcctccttctacgagcgcgccggtctcgtcacctgcatcggcgggccgaagcgccagggctccgtcacgatcgtcggtgcagtgtctccaccg

SEQ ID NO: 962 - DNA, 469 bp, Leishmania donovani ATCC 50212
tgtcattagtcaggccctctccaagtactccaactccgattgcgtcatctatgtcggctgcggcgagcgcggtaatgagatggccgaggtgctcatggagttcccgaccctgacgaccgtgatcgatggccgcgaggagtcgatcatgaagcgcacctgcctcgtggcgaacacctcgaacatgccagtcgcagcccgtgaggcctctatttacaccggcatcaccctggccgagtactaccgtgatatgggcaagcatatcgccatgatggctgactcgacgtctcgctgggccgaggcgcttcgtgagatttcgggtcgtctggcggagatgccggccgatggtggctaccccgcctacctcagcgctcgtctcgcctccttctacgagcgcgccggcctcgtcacctgcatcggcgggccgaagcgccagggctccgtcacgatcgtcggtgccgtgtctccaccg

SEQ ID NO: 963 - DNA, 469 bp, Leishmania hertigi ATCC 50125
tgtgatcagtcaggccctttccaagtactccaactcggactgcgtcatctacgtcggctgtggtgagcgcgggaacgagatggccgaggtgctcatggatttcccgactttgacgactgtgatcgatggtcgcgaggagtccatcatgaagcgcacctgcctcgtggcgaacacctccaacatgccagttgcagcccgtgaggcttctatctataccggcatcacactggctgagtactatcgtgatatgggcaagcacattgccatgatggccgactcgacgtctcgctgggccgaggcgttgcgtgagatttccggtcggctggcggagatgccggccgatggtggttaccccgcctacctcagtgcccgtctcgcctccttctacgagcgcgctggcctcgtgacctgtatcggcgggccgaagcgccagggctccgtcacaattgttggtgcggtgtctccaccg

SEQ ID NO: 964 - DNA, 469 bp, Leishmania mexicana ATCC 50156
ggtcattagtcaggccctttccaagtactccaactctgactgcgtcatctacgtcggctgcggcgagcgcggtaatgagatggccgaggtgctcatggagttcccgaccctgacgaccatgatcgatggtcgggaggagtcgatcatgaagcgcacctgcctcgtggcgaacacctcgaacatgcccgtcgcagcccgtgaggcctctatctacaccggcatcaccctcgccgagtactaccgtgatatgggcaagcatatcgccatgatggccgactcgacgtctcgctgggctgaggcgcttcgtgagatttcgggtcgtctggcggagatgccggccgatggtggctaccccgcctacctcagcgctcgtctcgcctccttctacgagcgcgccggcctcgtcacctgcatcggcgggccgaagcgccagggctccgtcacgatcgtcggtgccgtgtctccgccg

SEQ ID NO: 965 - DNA, 469 bp, Leishmania tropica ATCC 50129; identical to SEQ ID NO: 960

SEQ ID NO: 966 - DNA, 449 bp, Peptostreptococcus anaerobius ATCC 27337
caccagttcgccaagtgggcagatgctcagatagttgtatacgttggttgtggagaacgtggtaacgagatgacagacgttctaaatgaattcccagaactgattgaccctcatacaggcgaatctctaatgaagagaacagttcttatagctaatacgtcaaatatgccagttgcagccagagaggcaagtatatatacaggtattacaatagctgaatattttagagacatgggatattcagtagcggtaatggccgactctacatcaagatgggcagaggccctaagagagatgtcaggtcgtctagaagaaatgcctggtgatgaaggttatccagcctatctaggttctagagctgcagagttctatgaaagagcaggtaaggtaatatgtaagggtagcgataatagagagggagcccttacaataataggtgccgtgtcacc

SEQ ID NO: 967 - DNA, 826 bp, Bordetella pertussis ATCC 9797
ctggtggtgtcggccgcagacggcccgatgccgcagacgcgcgagcacattttgctgtcgcgccaggttggcgtgccgtacatcatcgtgttcctgaacaaggcggacatggttgatgacgcggagctgctcgagctggtgaagatggaagtccgcgaactgctgagcaagtacgatttcccgggcgatgacacgccgatcgtgaagggttcggccaagctggcgctggaaggcgacaagggcgaactgggcgagcaggcgattctgtcgctggcgcaagcgctggacacgtacattccgacgccggagcgcgcggtcgacggtgcgttcctgatgccggtggaagacgtgttctcgatctcgggccgtggcacggtggtgactggccgtatcgagcgcggcgtggtgaaggttggcgaggaaatcgaaatcgtgggcatcaagccgacggtgaagacgacctgcacgggcgtggagatgttccgcaagctgctggaccagggccaggcgggcgacaacgtgggtatcttgctgcgcggcaccaagcgtgaagacgtcgagcgtggccaggtgctggccaagccgggttcgatcaacccgcacacggacttcacggccgaggtgtacattctgtccaaggaagagggtggccgtcacacgccgttcttcaacggctatcgtccgcagttctacttccgcacgacggacgtgaccggcacgatcgacctgccggcggacaaggaaatggtgctgccgggcgacaacgtgtcgatgaccgtcaagctgctggccccgatcgccatggaagaaggtctgcgtttcgcca

SEQ ID NO: 968 - DNA, 817 bp, Bordetella pertussis strain BD180
cgatcctggtggtgtcggccgcagacggcccgatgccgcagacgcgcgagcacattttgctgtcgcgccaggttggcgtgccgtacatcatcgtgttcctgaacaaggcggacatggttgatgacgcggagctgctcgagctggtggagatggaagtccgcgaactgctgagcaagtacgatttcccgggcgatgacacgccgatcgtgaagggttcggccaagctggcgctggaaggcgacaagggcgaactgggcgagcaggcgattctgtcgctggcgcaagcgctggacacgtacattccgacgccggagcgcgcggtcgacggtgcgttcctgatgccggtggaagacgtgttctcgatctcgggccgtggcacggtggtgactggccgtatcgagcgcggcgtggtgaaggttggcgaggaaatcgaaatcgtgggcatcaagccgacggtgaagacgacctgcacgggcgtggagatgttccgcaagctgctggaccagggccaggcgggcgacaacgtgggtatcttgctgcgcggcaccaagcgtgaagacgtcgagcgtggccaggtgctggccaagccgggttcgatcaacccgcacacggacttcacggccgaggtgtacattctgtccaaggaagagggtggccgtcacacgccgttcttcaacggctatcgtccgcagttctacttccgcacgacggacgtgaccggcacgatcgacctgccggcggacaaggaaatggtgctgccgggcgacaacgtgtcgatgaccgtcaagctgctggccccgatcgccatggaagaagg

SEQ ID NO: 969 - DNA, 637 bp, Enterococcus columbae ATCC 51263
cctatgccacaaactcgtgaacacattcttttatcacgtaacgttggtgtgccatacatcgttgttttcttaaacaaagttgatatggttgacgacgaagaattattagaattagttgaaatggaagttcgtgacttattaactgaatatgacttcccaggagacgatgttcctgtaatcgctggttctgcattaaaagctttagaaggcgaccctgcttacgaagaaaaaatcttagaattaatggctgcagttgacgaatacatcccaactccagaacgtgacaacgacaaaccattcatgatgccagttgaagacgtgttctcaattactggtcgtggtactgttgctacaggtcgtgttgaacgtggacaagttcgtgttggtgacgaagttgaaatcgttggtatcgctgacgaaacttctaaaacaacagttactggtgttgaaatgttccgtaaattattagattacgctgaagctggagacaacatcggtgcattattacgtggtgtggctcgtgaagacatccaacgtggtcaagtattagctaaaccaggttcaatcactccacatacaaaattcactgctgaagtgtacgttttaactaaagaagaaggtggacgtcatactccat

SEQ ID NO: 970 - DNA, 634 bp, Enterococcus flavescens ATCC 49997
tatgcctcaaacacgtgaacacatcttgttatcacgtaacgttggtgtaccatacatcgttgttttcttaaacaaaatggatatggttgatgacgaagaattactagaattagttgaaatggaagttcgtgacttattgtcagaatatgacttcccaggcgacgatgttcctgtaatcgctggttctgctttgaaagctcttgaaggcgatgcttcatacgaagaaaaaatcatggaattaatggctgcagttgacgaatacgttccaactccagaacgtgacactgacaaaccattcatgatgccagtcgaagacgtattctcaatcactggacgtggtactgttgctacaggccgtgttgaacgtggacaagttcgcgttggtgacgaagttgaaatcgttggtattgctgaagaaactgctaaaacaactgtaactggtgttgaaatgttccgtaaattgttagactatgctgaagcaggggataacattggtgcattgctacgtggggttgctcgtgaagacatccaacgtggacaagtattagctaaagctggtacaatcacacctcatacaaaatttaaagctgaagtttacgttttaacaaaagaagaaggtggacgtcacactcca

SEQ ID NO: 971 - DNA, 787 bp, Streptococcus pneumoniae strain StrR-55
ggaccaatgccacaaactcgtgagcacatccttctttcacgtcaggttggtgttaaacaccttatcgtcttcatgaacaaagttgacttggttgacgacgaagaattgcttgaattggttgaaatggaaatccgtgacctattgtcagaatacgacttcccaggtgacgatcttccagttatccaaggttcagcacttaaagctcttgaaggtgactctaaatacgaagacatcgttatggaattgatgaacacagttgatgagtatatcccagaaccagaacgtgacactgacaaaccattgcttcttccagtcgaggacgtattctcaatcactggacgtggtacagttgcttcaggacgtatcgaccgtggtatcgttaaagtcaacgacgaaatcgaaatcgttggtatcaaagaagaaactcaaaaagcagttgttactggtgttgaaatgttccgtaaacaacttgacgaaggtcttgctggagataacgtaggtgtccttcttcgtggtgttcaacgtgatgaaatcgaacgtggacaagttatcgctaaaccaggttcaatcaacccacacactaaattcaaaggtgaagtctacatccttactaaagaagaaggtggacgtcacactccattcttcaacaactaccgtccacaattctacttccgtactactgacgttacaggttcaatcgaacttccagcaggtactgaaatggtaatgcctggtgataacgtgacaatcgacgttgagttgattcacccaatcgccgtagaacaag

SEQ ID NO: 972 - DNA, 803 bp, Escherichia coli ATCC 35401
tagttgctgcgactgacggcccgatgccgcagactcgtgagcacatcctgctgggtcgtcaggtaggcgttccgtacatcatcgtgttcctgaacaaatgcgacatggttgatgacgaagagctgctggaactggttgaaatggaagttcgtgaacttctgtctcagtacgacttcccgggcgacgacactccgatcgttcgtggttctgctctgaaagcgctggaaggcgacgcagagtgggaagcgaaaatcctggaactggctggcttcctggattcttacattccggaaccagagcgtgcgattgacaagccgttcctgctgccgatcgaagacgtattctccatctccggtcgtggtaccgttgttaccggtcgtgtagaacgcggtatcatcaaagttggtgaagaagttgaaatcgttggtatcaaagagactcagaagtctacctgtactggcgttgaaatgttccgcaaactgctggacgaaggccgtgctggtgagaacgtaggtgttctgctgcgtggtatcaaacgtgaagaaatcgaacgtggtcaggtactggctaagccgggcaccatcaagccgcacaccaagttcgaatctgaagtgtacattctgtccaaagatgaaggcggccgtcatactccgttcttcaaaggctaccgtccgcagttctacttccgtactactgacgtgactggtaccatcgaactgccggaaggcgtagagatggtaatgccgggcgacaacatcaaaatggttgttaccctgatccacccgatcgcgatggacgacggt

SEQ ID NO: 973 - DNA, 762 bp, Escherichia coli ATCC 43895
actgacggcccgatgccgcagactcgtgagcacatcctgctgggtcgtcaggtaggcgttccgtacatcatcgtgttcctgaacaaatgcgacatggttgatgacgaagagctgctggaactggttgaaatggaagttcgtgaacttctgtctcagtacgacttcccgggcgacgacactccgatcgttcgtggttctgctctgaaagcgctggaaggcgacgcagagtgggaagcgaaaatcctggaactggctggcttcctggattcctacattccggaaccagagcgtgcrattgacaagccgttcctgctgccgatcgaagacgtattctccatctccggtcgtggtaccgttgttaccggtcgtgtagaacgcggtatcatcaaagttggtgaagaagttgaaatcgttggtatcaaagagactcagaagtctacctgtactggcgttgaaatgttccgcaaactgctggacgaaggccgtgctggtgagaacgtaggtgttctgctgcgtggtatcaaacgtgaagaaatcgaacgtggtcaggtactggctaagccgggcaccatcaagccgcacaccaagttcgaatctgaagtgtacattctgtccaaagatgaaggcggccgtcatactccgttcttcaaaggctaccgtccgcagttctacttccgtactactgacgtgactggtaccattgaactgccggaaggcgtagagatggtaatgccgggcgacaacatcaaaatggttgttacc

SEQ ID NO: 974 - DNA, 804 bp, Escherichia coli ATCC 11775
cctggtagttgctgcgactgacggcccgatgccgcagactcgtgagcacatcctgctgggtcgtcaggtaggcgttccgtacatcatcgtgttcctgaacaaatgcgacatggttgatgacgaagagctgctggaactggttgaaatggaagttcgtgaacttctgtctcagtacgacttcccgggcgacgacactccgatcgttcgtggttctgctctgaaagcgctggaaggcgacgcagagtgggaagcgaaaatcctggaactggctggcttcctggattcctacattccggaaccagagcgtgcgattgacaagccgttcctgctgccgatcgaagacgtattctccatctccggtcgtggtaccgttgttaccggtcgtgtagaacgcggtatcatcaaagttggtgaagaagttgaaatcgttggtatcaaagagactcagaagtctacctgtactggcgttgaaatgttccgcaaactgctggacgaaggccgtgctggtgagaacgtaggtgttctgctgcgcggtatcaaacgtgaagaaatcgaacgtggtcaggtactggctaagccgggcaccatcaagccgcacaccaagttcgaatctgaagtgtacattctgtccaaagatgaaggcggtcgtcatactccgttcttcaaaggctaccgtccgcagttctacttccgtactactgacgtgactggtaccatcgaactgccggaaggcgtagagatggtaatgccgggcgacaacatcaaaatggttgttaccctgatccacccgatcgcgatggacga

SEQ ID NO: 975 - DNA, 804 bp, Escherichia coli ATCC 25922
gcgatcctggtagttgctgcgactgacggcccgatgccgcagactcgtgagcacatcctgctgggtcgtcaggtaggcgttccgtacatcatcgtgttcctgaacaaatgcgacatggttgatgacgaagagctgctggaactggttgaaatggaagttcgtgaacttctgtctcagtacgacttcccgggcgacgacactccgatcgttcgtggttctgctctgaaagcgctggaaggcgacgcagagtgggaagcgaaaatcctggaactggctggcttcctggattcytacattccggaaccagagcgtgcgattgacaagccgttcctgctgccgatcgaagacgtattctccatctccggtcgtggtaccgttgttaccggtcgtgtagaacgcggtatcatcaaagttggtgaagaagttgaaatcgttggtatcaaagagactcagaagtctacctgtactggcgttgaaatgttccgcaaactgctggacgaaggccgtgctggtgagaacgtaggtgttctgctgcgtggtatcaaacgtgaagaaatcgaacgtggtcaggtactggctaagccgggcaccatcaagccgcacaccaagttcgaatctgaagtgtacattctgtccaaagatgaaggcggtcgtcatactccgttcttcaaaggctaccgtccgcagttctacttccgtactactgacgtgactggtaccatcgaactgccggaaggtgtagagatggtaatgccgggcgacaacatcaaaatggttgttaccctgatccacccgatcgcgatg

SEQ ID NO: 976 - DNA, 825 bp, Mycobacterium avium strain Mavi-1
ggcgcgatcctggtggtcgccgccaccgacggcccgatgccgcagacccgtgagcacgtgctgctcgcccgtcaggtcggtgtgccctacatcctggtcgccctgaacaaggccgacatggtcgacgacgaggagctcctcgagctcgtcgagatggaggtccgcgagctgctggccgcccaggagttcgacgaggacgccccggtggtgcgggtctcggcgctcaaggcgctcgagggcgacgccaagtgggtcgagtccgtcgagcagctgatggaggccgtcgacgagtcgatcccggacccggtccgcgagacggagaagccgttcctgatgccggtggaggacgtcttcaccatcaccgggcgtggcaccgtggtcaccggtcgtgtcgagcgcggtgtgatcaacgtgaacgaggaagtcgagatcgtcggcatccgcccgaccagcaccaagaccacggtcaccggtgtggaratgttccgcaagctgctcgaccagggccaggccggtgacaacgtcggtctgctgctgcgtggtatcaagcgtgaggacgtcgagcgcggccaggtcgtgaccaagcccggcaccaccacgccgcacaccgagttcgagggccaggtctacatcctgtccaaggacgagggcggccggcacacgccgttcttcaacaactaccgtccgcagttctacttccgcaccaccgacgtgaccggtgtggtgacgctgccggagggcaccgagatggtgatgcccggtgacaacaccaacatctcggtgaagctgatccagcccgtcgccatggacgacggtstgcggttc

SEQ ID NO: 977 - DNA, 820 bp, Streptococcus pneumoniae strain StrR-06
tatccttgtagtagcttcaactgacggaccaatgccacaaactcgtgagcacatccttctttcacgtcaggttggtgttaaacaccttatcgtcttcatgaacaaagttgacttggttgacgacgaagaattgcttgaattggttgaaatggaaatccgtgacctattgtcagaatacgacttcccaggtgacgatcttccagttatccaaggttcagcacttaaagctcttgaaggtgactctaaatacgaagacatcgttatggaattgatgaacacagttgatgagtatatcccagaaccagaacgtgacactgacaaaccattgcttcttccagtcgaggacgtattctcaatcactggacgtggtacagttgcttcaggacgtatcgaccgtggtatcgttaaagtcaacgacgaaatcgaaattgttggtatcaaagaagaaactcaaaaagcagttgttactggtgttgaaatgttccgtaaacaacttgacgaaggtcttgctggagataacgtaggtgtccttcttcgtggtgttcaacgtgatgaaatcgaacgtggacaagttatcgctaaaccaggttcaatcaacccacacactaaattcaaaggtgaagtctacatccttactaaagaagaaggtggacgtcacactccattcttcaacaactaccgtccacaattctacttccgtactactgacgttacaggttcaatcgaacttccagcaggtactgaaatggtaatgcctggtgataacgtgacaatcgacgttgagttgattcacccaatcgccgtagaacaaggtactaca

SEQ ID NO: 978 - DNA, 822 bp, Mycobacterium gordonae strain M-Gor-1
ggcgcgatcctggtggtcgccgccaccgatggcccgatgccgcagacccgtgagcacgtgctgctcgcccgtcaggtgggcgtgccctacatcctggtggcgctgaacaagtccgacgcggtcgacgacgaggagctgctcgagctcgtcgagctggaggtccgcgagttgctggccgcccaggacttcgacgaggaagctccggtggtccgggtctcggcgctgaaggcgctcgagggcgacgccacctgggtgaagtcggtagaggacttgatggacgcggtcgacgagtcgattccggacccggtccgcgacaccgacaagccgttcctgatgcccgtcgaggacgtcttcaccatcaccggtcgtggcaccgtcgtcaccggccgtgtggagcgcggcgtggtgaacgtgaacgaggaagtcgagatcgtcggcatcaagccgaccagcaccaagaccacggtcaccggtgtggagatgttccgcaagctgctcgaccagggtcaggccggtgacaacgtcggtctgctgctgcgtggtgtcaagcgtgaggacgtcgagcgcggccaggtcgtcatcaagcccggcaccaccactccgcacaccgagttcgagggtcaggtctacatcctgtccaaggacgagggcggccggcacacgccgttcttcaacaactaccgtccgcagttctacttccgcaccaccgacgtgaccggtgtggtgacgctgccggagggcaccgaaatggtgatgcccggtgacaacaccaacatctcggtgaagctgatccagcccgtcgccatggacgacggtctgcgg

SEQ ID NO: 979 - DNA, 821 bp, Streptococcus pneumoniae strain StrR-11
ctatccttgtagtagcttcaactgacggaccaatgccacaaactcgtgagcacatccttctttcacgtcaggttggtgttaaacaccttatcgtcttcatgaacaaagttgacttggttgacgacgaagaattgcttgaattggttgaaatggaaatccgtgacctattgtcagaatacgacttcccaggtgacgatcttccagttatccaaggttcagcacttaaagctcttgaaggtgactctaaatacgaagacatcgttatggaattgatgaacacagttgatgagtatatcccagaaccagaacgtgacactgacaaaccattgcttcttccagtcgaggacgtattctcaatcactggacgtggtacagttgcttcaggacgtatcgaccgtggtatcgttaaagtcaacgacgaaatcgaaatcgttggtatcaaagaagaaactcaaaaagcagttgttactggtgttgaaatgttccgtaaacaacttgacgaaggtcttgctggagataacgtaggtgtccttcttcgtggtgttcaacgtgatgaaatcgaacgtggacaagttatcgctaaaccaggttcaatcaacccacacactaaattcaaaggtgaagtctacatccttactaaagaagaaggtggacgtcacactccattcttcaacaactaccgtccacaattctacttccgtactactgacgttacaggttcaatcgaacttccagcaggtactgaaatggtaatgcctggtgataacgtgacaatcgacgttgagttgattcacccaatcgccgtagaacaaggtactaca

SEQ ID NO: 980 - DNA, 828 bp, Mycobacterium tuberculosis ATCC 25177
  misc_feature (1)...(828): n=a,t,c or g
ggtgcgatcctggtggtcgccgccaccgacggcccgatgccccagacccgcgagcacgttctgctggcgcgtcaagtgggtgtgccctacatcctggtagcgctgaacaaggccgacgcagtggacgacgaggagctgctcgaactcgtcgagatggaggtccgcgagctgctggctgcccaggaattcgacgaggacgccccggttgtgcgggtctcggcgctcaaggcgctcgagggtgacgcgaagtgggttgcctctgtcgaggaactgatgaacgcggtcgacgagtcgattccggacccggtccgcgagaccgacaagccgttcctgatgccggtcgaggacgtcttcaccattaccggccgcggaaccgtggtcaccggacgtgtggagcgcggcgtgatcaacgtgaacgaggaagttgagatcgtcggcattcgcccatcgaccaccaagaccaccgtcaccggtgtggagatgttccgcaagctgctcgaccagggccaggcgggcgacaacgttggtttgctgctgcggggcgtcaagcgcgaggacgtcgagcgtggccaggttgtcaccaagcccggcaccaccacgccgcacaccgagttcgaaggccaggtctacatcctgtccaaggacgagggcggccggcacacgccgttcttcaacaactaccgtccgcagttctacttccgcaccaccgacgtgaccggtgtggtgacactgccggagggcaccgagatggtgatgcccggtgacaacaccaacatctcggtgaagttgatccagcccgtcgccatggacgaaggtntgcgtttcgcg

SEQ ID NO: 981 - DNA, 819 bp, Staphylococcus warneri strain CSG 144
cggcggtatcttagtagtatctgctgcagatggcccaatgccacaaactcgtgaacacatcttattatcacgtaacgttggtgtaccagctttagttgtattcttaaacaaagctgacatggttgacgacgaagaattattagaattagttgaaatggaagttcgtgacttattatctgaatacgacttccctggtgacgatgtaccagttatcgttggttctgcattaaaagctttagaaggcgacccagaatacgaacaaaaaatcttagacttaatgcaagctgtagatgactacatcccaactccagaacgtgactctgataaaccattcatgatgccagttgaggacgtattctcaatcactggtcgtggtactgtagcaacaggccgtgttgaacgtggtcaaatcaaagtcggtgaagaagttgaaatcatcggtatcactgaagaaagcaagaaaacaacagttacaggtgtagaaatgttccgtaaattattagactacgctgaagctggtgacaacatcggtgctttattacgtggtgttgcacgtgaagacgtacaacgtggacaagtattagcagctcctggctctattactccacacacaaaattcaaagctgatgtttacgttttatctaaagaagaaggtggacgtcatactccattcttcactaactaccgcccacaattctacttccgtactactgacgtaactggcgttgttcacttaccagaaggtactgaaatggttatgcctggcgataacgtagaaatgactgttgaattaatcgctccaatcgcgattgaagacgg

SEQ ID NO: 982 - DNA, 814 bp, Streptococcus mitis strain LSPQ 2583
ctatccttgtagtagcttcaactgacggaccaatgccacaaactcgtgagcacatccttctttcacgtcaggttggtgttaaacaccttatcgtcttcatgaacaagatcgacttggttgatgacgaagaattgcttgaattggttgaaatggaaatccgtgacctcttgtcagaatacgacttcccaggtgacgatcttccagttatccaaggttcagctcttaaagctcttgaaggtgatactaagtacgaagacatcatcatggaattgatgaacactgttgatgagtacatcccagaaccagaacgtgatactgacaaacctcttcttcttccagtcgaagacgtattctcaatcactggtcgtggtacagttgcttcaggacgtatcgaccgtggtactgttcgtgtcaacgatgaaatcgaaatcgttggtatcaaagaagaaatccaaaaagcagttgttactggtgttgaaatgttccgtaaacagcttgacgaaggtcttgcaggggacaacgtaggtgtacttcttcgtggtatccaacgtgatgaaatcgaacgtggtcaagttatcgctaaaccaggttcaatcaacccacacactaaattcaagggtgaagtttacatccttactaaagaagaaggtggacgtcacactccattcttcaacaactaccgtccacagttctacttccgtacaactgacgttacaggttcaatcgaacttccagcaggtactgaaatggtaatgcctggtgataacgtaactatcgacgttgagttgatccacccaatcgccgttgaacaagg

SEQ ID NO: 983 - DNA, 810 bp, Streptococcus mitis ATCC 49456
ctatccttgtagtagcttcaactgacggaccaatgccacaaactcgtgagcacatccttctttcacgtcaggttggtgttaaacaccttatcgtcttcatgaacaaagttgacttggttgacgacgaagaattgcttgaattggttgaaatggaaatccgtgacctattgtcagaatacgacttcccaggtgacgatcttccagttatccaaggttcagctcttaaagcccttgaaggtgacactaaatacgaagacatcgttatggaattgatgaacacagttgatgagtacatcccagaaccagaacgtgacactgacaaaccattgcttcttccagtcgaagacgtattctcaatcactggtcgtggtacagttgcttcaggacgtatcgaccgtggtatcgttaaagtcaacgacgaaatcgaaatcgttggtatcaaagaagaaactcaaaaagcagttgttactggtgttgaaatgttccgtaaacaacttgacgaaggtcttgccggagataatgtaggtgtccttcttcgtggtgttcaacgtgatgaaatcgaacgtggacaagttattgctaaaccaggttcaatcaacccacacactaaattcaaaggtgaagtttacatccttactaaagaagaaggtggacgtcacactccattcttcaacaactaccgtccacaattctacttccgtactactgacgttacaggttcaatcgaacttccagcaggtactgaaatggtaatgcctggtgataacgtgacaatcgacgttgagttgatccacccaatcgccgtagaac

SEQ ID NO: 984 - DNA, 817 bp, Streptococcus mitis ATCC 903
tccttgtagtagcttcaactgacggaccaatgccacaaactcgtgagcacatccttctttcacgtcaggttggtgttaaacaccttatcgtcttcatgaacaagatcgacttggttgatgacgaagaattgcttgaattggttgaaatggaaatccgtgacctcttgtcagaatacgacttcccaggtgacgatcttccagttatccaaggttcagctcttaaagctcttgaaggtgatactaagtacgaagacatcatcatggaattgatgaacactgttgatgagtacatcccagaaccagaacgtgatactgacaaacctcttcttcttccagtcgaagacgtattctcaatcactggtcgtggtacagttgcttcaggacgtatcgaccgtggtactgttcgtgtcaacgatgaaatcgaaatcgttggtatcaaagaagaaatccaaaaagcagttgttactggtgttgaaatgttccgtaaacagcttgacgaaggtcttgcaggggacaacgtaggtgtacttcttcgtggtatccaacgtgatgaaatcgaacgtggtcaagttatcgctaaaccaggttcaatcaacccacacactaaattcaagggtgaagtttacatccttactaaagaagaaggtggacgtcacactccattcttcaacaactaccgtccacagttctacttccgtacaactgacgttacaggttcaatcgaacttccagcaggtactgaaatggtaatgcctggtgataacgtaactatcgacgttgagttgatccacccaatcgccgttgaacaaggtactac

SEQ ID NO: 985 - DNA, 798 bp, Streptococcus oralis ATCC 35037
gacggaccaatgccacaaactcgtgagcacatccttctttcacgtcaggttggtgttaaacaccttattgtcttcatgaacaaaattgacttggtagacgacgaagaattgcttgaattggttgaaatggaaatccgtgacctcttgtcagaatacgacttcccaggtgacgatcttccagttatccaaggttcagctcttaaagctcttgaaggtgactctaaatacgaagacatcattatggaattgatgaacactgttgatgagtacatcccagaaccagaacgtgacactgaaaaaccattgcttcttccagtcgaagacgtattctcaatcactggacgtggtacagttgcttcaggacgtatcgaccgtggtactgttcgtgtcaacgacgaaatcgaaatcgttggtatcaaagaagaaactcaaaaagcagttgttactggtgttgaaatgttccgtaaacaacttgacgaaggtcttgccggagataacgtaggtgtccttcttcgtggtgttcaacgtgacgaaatcgaacgtggacaagttatcgctaaaccaggttcaatcaacccacacactaaatttaaaggtgaagtctacatccttactaaagaagaaggtggacgtcacactccattcttcaacaactaccgtccacaattctacttccgtactactgacgttacaggttcaatcgaacttcctgcaggtactgaaatggtaatgcctggtgataacgtgactatcgacgttgagttgatccacccaatcgccgtagaacaaggtactaca

SEQ ID NO: 986 - DNA, 815 bp, Streptococcus pneumoniae strain StrR-05
ttgtagtagcttcaactgacggaccaatgccacaaactcgtgagcacatccttctttcacgtcaggttggtgttaaacaccttatcgtcttcatgaacaaagttgacttggttgacgacgaagaattgcttgaattggttgaaatggaaatccgtgacctattgtcagaatacgacttcccaggtgacgatcttccagttatccaaggttcagcacttaaagctcttgaaggtgactctaaatacgaagacatcgttatggaattgatgaacacagttgatgagtatattccagaaccagaacgtgacactgacaaaccattgcttcttccagtcgaggacgtattctcaatcactggacgtggtacagttgcttcaggacgtatcgaccgtggtatcgttaaagtcaacgacgaaatcgaaatcgttggtatcaaagaagaaactcaaaaagcagttgttactggtgttgaaatgttccgtaaacaacttgacgaaggtcttgctggagataacgtaggtgtccttcttcgtggtgttcaacgtgatgaaatcgaacgtggacaagttatcgctaaaccaggttcaatcaacccacacactaaattcaaaggtgaagtctacatccttactaaagaagaaggtggacgtcacactccattcttcaacaactaccgtccacaattctacttccgtactactgacgttacaggttcaatcgaacttccagcaggtactgaaatggtaatgcctggtgataacgtgacaatcgacgttgagttgattcacccaatcgccgtagaacaaggtactaca

SEQ ID NO: 987 - DNA, 832 bp, Enterococcus hirae ATCC 8043
cggacaatcttggttgtttctgctacggatggcccaatgcctcaaactcgtgaacacattttactttctcgccaagtaggcgtgaaatatttgattgttttcttgaacaaaacagatttagtcgatgatgaagaattaattgatctagtagaaatggaagttcgtgaactattaagcgaatatggatttccaggtgatgatacacctgttatcaaaggatcagcattaaaagcattacaaggtgatcctgatgcagaagcagctatcatggaattgatggacacagtcgatgaatacatcccaacaccagaacgtgatacggacaaaccattattgttacccgccgaagatgtattttcaattactggacgtggaacagtagcatctggtcggattgaccgtggggctgttagagtcggtgacgaaatcgaaatcgtagggatcaaaccagaaacgcaaagagccgtagtaacaggagttgaaatgttccgcaaaacgcttgattacggtgaagcaggggataacgtaggtgtgttattacgtgggattcaaagagaagacatcgaacgtggccaagtgattgccaaacctggttcaattacacctcatactaaattcaaagcagaagtttaggttttgactaaagaagaaggcggacgtcatacaccattcttcaataattatcgaccacaattttatttccgcacaactgacgtaacaggaacaattgttttgccagaaggaacggaaatggtcatgcctggcgacaacgtaacgatcgatgtagaattgattcatcctgttgctattgaaaacgggacgactttctcca

SEQ ID NO: 988 - DNA, 835 bp, Enterococcus mundtii ATCC 43186
tggtgcgatcttagttgtttctgcgacagatggaccaatgcctcaaactcgcgagcatatccttttatcacgtcaagttggtgtaaaatatttgattgtatttttgaataaagttgatttggtcgatgatgaagaattgatcgatcttgtagaaatggaagttcgtgaattactgaatgaatatggtttcccaggtgatgacacacctgtcatcaaaggctctgcattgaaagcattgcaaggtgacccagaagcagaagctgcgatcaatgaattgatggaaacagtggatgactatatcccaacaccagaacgtgataccgacaaaccattgcttttaccagttgaagatgttttctcaatcactggtcgcggaacggtagcatctggtcgtatcgaccgtggagccgttcgtgtcggtgatgaaatcgagatcatcggaatcaaacctgaaacgaaaaaagcggttgtgacaggggtagagatgttccgtaaaacgttagattatggcgaagctggagataacgtaggaatcttgttacgtggtatccaaagagaagatattgaacgtggacaagtaattgcgaaacctggttcaatcacaccacatacaaaattcaaagcggaagtttatgtattgacgaaagaagaaggcggacgtcatacaccattcttcaataactaccgcccacaattttatttccgcacaacagatgtaacaggtacgatcgtgttgccagaaggaacagaaatggtcatgcctggagacaacgtaaccatcgaggtagagttgatccatccagtggcaatcgaacaaggaacgactttctctatt

SEQ ID NO: 989 - DNA, 832 bp, Enterococcus raffinosus ATCC 49427
tgcgatcttagtagtatctactactgatggaccaatgcctcaaacacgtgagcacattttgttatcacgccaagtaggtgttaaatacttgatcgtcttcttgaacaaagttgatttagtcgacgatgaagaattgattgatttagttgaaatggaagtacgtgagttactttcagaatatggtttcccaggcgatgatattcctgttcttaaaggttcagctctgaaagctttagaaggcgatcctgaacaagaacaagtaatcatggacctaatggatacggttgacgaatatatcccaacaccagaacgtgacactgacaaaccattcttgttaccagtggaagatgttttctcaatcacaggacgtgggactgttgcatctggtcgtattgatcgtggggaagttaaagtcggtgacgaagttgaaattatcgggatcaaacctgaagttcaaaaggctgtcgtaactggacttgaaatgttccgtaaaacattggattatggtgaagctggagataacgttggggttctattacgtggtattacacgtgatgaaatcgaacgtggtcaagtattagctaaaccaggttcaattacaccacatacgaaattcagtgcagaagtttatgtgttgacgaaagaagaaggtggacgtcatacaccattctttaacaactatcgtcctcaattctacttccgtacaacagacgttaccggtaatatcgtgttgccagaaggtactgaaatggtcatgcctggcgataacgtaacaatcgacgttgaattaatccatccaatcgccgtagaaaaaggaacaactttctctatt

SEQ ID NO: 990 - DNA, 154 bp, Bacillus anthracis strain CIP 9440
ggatcctgtatatgcacaaaaactaggtgttaacatcgatgaattactattatcacaacctgatacaggggagcaaggtttagaaatcgcagaagcacttgtacgaagtggtgcggttgatattatcgtaattgactctgtagcagctcttgta

SEQ ID NO: 991 - DNA, 384 bp, Prevotella melaninogenica ATCC 25845
gccattgcagaggcacagaagcagggcggtattgcagccttcattgatgctgagcacgccttcgaccgtttctatgcagagaagttaggtgtggatgttgataacctttgggtttcacagccagacaatggtgagcaggctttagagattgccgaccagctgattcgctcttccgctattgacattctcgttgtcgactcagttgcagccttgactccaaagaaggagattgagggtgacatgggtgactctgcagtaggtttacaagcacgactgatgagtcaggcattgcgtaaacttacctcaacaatcgcaaaaactaatacttgctgcatcttcatcaaccagttgcgtgagaagattggtgtgatgtttggtaatcca

SEQ ID NO: 992 - DNA, 624 bp, Enterococcus casseliflavus strain R760
acacgtgaacacatcttgttatcacgtaacgttggtgtaccatacatcgttgttttcttaaacaaaatggatatggttgatgacgaagaattactagaattagttgaaatggaagttcgtgacttattgtcagaatatgacttcccaggcgacgatgttcctgtaatcgctggttctgctttgaaagctcttgaaggcgatgcttcatacgaagaaaaaatcatggaattaatggctgcagttgacgaatacgttccaactccagaacgtgacactgacaaaccattcatgatgccagtcgaagacgtattctcaatcactggacgtggtactgttgctacaggccgtgttgaacgtggacaagttcgcgttggtgacgaagttgaaatcgttggtattgctgaagaaactgctaaaacaactgtaactggtgttgaaatgttccgtaaattgttagactatgctgaagcaggggataacattggtgcattgctacgtggtgttgctcgtgaagacatccaacgtggacaagtattggctaaagctggtacaatcacacctcatacaaaatttaaagctgaagtttacgttttaacaaaagaagaaggtggacgtcatacacca

SEQ ID NO: 993 - DNA, 756 bp, Streptococcus pyogenes
atggaaaacaataaaaaagtattgaagaaaatggtattttttgttttagtgacatttcttggactaacaatctcgcaagaggtatttgctcaacaagaccccgatccaagccaacttcacagatctagtttagttaaaaaccttcaaaatatatattttctttatgagggtgaccctgttactcacgagaatgtgaaatctgttgatcaacttttatctcacgatttaatatataatgtttcagggccaaattatgataaattaaaaactgaacttaagaaccaagagatggcaactttatttaaggataaaaacgttgatatttatggtgtagaatattaccatctctgttatttatgtgaaaatgcagaaaggagtgcatgtatctacggaggggtaacaaatcatgaagggaatcatttagaaattcctaaaaagatagtcgttaaagtatcaatcgatggtatccaaagcctatcatttgatattgaaacaaataaaaaaatggtaactgctcaagaattagactataaagttagaaaatatcttacagataataagcaactatatactaatggaccttctaaatatgaaactggatatataaagttcatacctaagaataaagaaagtttttggtttgattttttccctgaaccagaatttactcaatctaaatatcttatgatatataaagataatgaaacgcttgactcaaacacaagccaaattgaagtctacctaacaaccaagtaa

SEQ ID NO: 994 - DNA, 23 bp, Artificial Sequence
  Synthetic DNA Sequence
tggactaacaatctcgcaagagg

SEQ ID NO: 995 - DNA, 22 bp, Artificial Sequence
  Synthetic DNA Sequence
acattctcgtgagtaacagggt

SEQ ID NO: 996 - DNA, 25 bp, Artificial Sequence
  Synthetic DNA Sequence
acaaatcatgaagggaatcatttag

SEQ ID NO: 997 - DNA, 23 bp, Artificial Sequence
  Synthetic DNA Sequence
ctaattcttgagcagttaccatt

SEQ ID NO: 998 - DNA, 23 bp, Artificial Sequence
  Synthetic DNA Sequence
ggaggggtaacaaatcatgaagg

SEQ ID NO: 999 - DNA, 23 bp, Artificial Sequence
  Synthetic DNA Sequence
ttgaccttgttgatgacgaagag

SEQ ID NO: 1000 - DNA, 23 bp, Artificial Sequence
  Synthetic DNA Sequence
ttagtgtgtgggttgattgaact

SEQ ID NO: 1001 - DNA, 23 bp, Artificial Sequence
  Synthetic DNA Sequence
aagagttgcttgaattagttgag

SEQ ID NO: 1002 - DNA, 894 bp, Streptococcus pyogenes ATCC 700294
aacatgatcactggtgccgctcaaatggacggagctatccttgtagttgcttcaactgatggaccaatgccacaaactcgtgagcacatccttctttcacgtcaggttggtgttaaacaccttatcgtgttcatgaacaaagttgaccttgttgatgacgaagagttgcttgaattagttgagatggaaattcgtgaccttctttcagaatacgatttcccaggtgatgaccttccagttatccaaggttcagctcttaaagctcttgaaggcgacactaaatttgaagacatcatcatggaattgatggatactgttgattcatacattccagaaccagaacgcgacactgacaaaccattgcttcttccagtcgaagacgtattctcaattacaggtcgtggtacagttgcttcaggacgtatcgaccgtggtactgttcgtgtcaacgacgaaatcgaaatcgttggtatcaaagaagaaactaaaaaagctgttgttactggtgttgaaatgttccgtaaacaacttgacgaaggtcttgcaggagacaacgtaggtatccttcttcgtggtgttcaacgtgacgaaatcgaacgtggtcaagttattgctaaaccaagttcaatcaacccacacactaaattcaaaggtgaagtatatatcctttctaaagacgaaggtggacgtcacactccattcttcaacaactaccgtccacaattctacttccgtacaactgacgtaacaggttcaatcgaacttccagcaggtacagaaatggttatgcctggtgataacgtgacaatcaacgttgagttgatccacccaatcgccgtagaacaaggtactactttctcaatccgtgaaggtggacgtactgttggttcaggt

SEQ ID NO: 1003 - DNA, 332 bp, Bacillus cereus ATCC 14579
aatggatcctgtatatgcacaaaaattaggcgttaacatagatgaattactattatcacagcctgatacaggggagcaaggattagaaatcgcggaagcacttgtacgaagtggtgcggttgacattatcgtaattgactctgtagcagctcttgtaccgaaagcagagattgaaggcgacatgggtgactcacacgtaggtttacaagcacgtttaatgtcacaagcacttcgtaagctttcaggagcaatcaacaaatcaaaaacaattgcaatctttattaaccaaattcgtgaaaaagttggggttatgttcggaaacccagaaacaa

SEQ ID NO: 1004 - DNA, 1212 bp, Streptococcus pneumoniae strain StrR-01
accaagaagctcaaaaacatctgtgggatatctacaactccgatcaatacgtctcttaccctgacgatgatttgcaagtcgcatctacggtcgtagatgtttcaaatggtaaagtcatcgcccaacttggagctcgtcaccaagcaagtaacgtttcatttggtaccaaccaagctgtggaaaccaatcgtgactggggttctgctatgaaaccaatcaccgattatgcacctgccatagaatacggtgtttatgattccactgcaactatggttaatgatattccttataactatccgggaacaagcacacctgtctacaactgggatagagcatatttcggtaatattactctgcaatatgctcttcaacaatcacgaaatgtcacagccgttgagactttgaataaggtcggtctagatagagctaaaaccttccttaatggtcttggtatcgactatccaagcatgcattatgcaaacgccatttcaagtaatacaacagaatctaataaacaatacggagcaagtagtgaaaaaatggctgctgcttatgctgcctttgcaaatggtggcacttactataaaccaatgtatatccataaagtcgtcttcagtgatggaagtaaaaaagagttctctaatgtcggaactcgtgccatgaaggaaacgacagcctatatgatgaccgacatgatgaaaacagtcttgacttatggaactgggcgtggagcctatcttccttggcttcctcaagctggtaaaacaggaacctctaactatacagatgaggaagttgaaaaccacatcaagaacactggctatgtagctccagatgaaatgtttgttggttatactcgtaagtattctatggctgtatggacaggttattcgaatcgtttaactcctatcgttggagatggtttcctagttgcagctaaagtttatcgctcaatgataacgtatctatcagaagatactcatccagaagactggacgatgccagacggacttttcagaaacggggaatttgtattcaaaaatggagctcgcccaatatggactgaaccctctactcaacaatcctcaacagctgaaagttcaagctcatcatcagatagttcaacttcacagtctagctcaaccactccaagcacaaataatagtacgactaccaatcctaacaataatacgcaacaatcaaatacaaccc

SEQ ID NO: 1005 - DNA, 1212 bp, Streptococcus pneumoniae strain StrR-02
aagctcaaaaacatctgtgggatatctacaactccgatcaatacgtctcttaccctgacgatgatttgcaagtcgcatctacggtcgtagatgtttcaaatggtaaagtcatcgcccaacttggagctcgtcaccaagcaagtaacgtttcatttggtaccaaccaagctgtggaaaccaatcgtgactggggttctgctatgaaaccaatcaccgattatgcacctgccatagaatacggtgtttatgattccactgcaactatggttaatgatattccttataactatccgggaacaagcacacctgtctacaactgggatagagcatatttcggtaatattactctgcaatatgctcttcaacaatcacgaaatgtcacagccgttgagactttgaataaggtcggtctagatagagctaaaaccttccttaatggtcttggtatcgactatccaagcatgcattatgcaaacgccatttcaagtaatacaacagaatctaataaacaatacggagcaagtagtgaaaaaatggctgctgcttatgctgcctttgccaacggtggaatttaccacaaacccatgtatatcaataaggtcgtcttcagtgacggtagtaaaaaagaattttcagatgtaggtacacgagctatgaaagaaacaactgcttacatgatgaccgaaatgatgaaaactgtcttggcatacggaactggtcgtggagcctatctcccatggttagcgcaagctggtaagacaggtacttctaactacacagatgatgaaattgaaaaacacatcaagaacactggctatgtagctccagatgaaatgtttgttggttatactcgtaagtattctatggctgtatggacaggttattcgaatcgtttaactcctatcgttggagatggtttcctagttgcagctaaagtttatcgctcaatgataacgtatctgtctgaaggaagcaatccagaggattggaatataccagaggggctctacagaaatggagaattcgtatttaaaaatggtgctcgttctacgtggagctcacctgctccacaacaacccccatcaactgaaagttcaagctcatcatcagatagttcaacttcacagtctaactcaaccactccaagcacaaataatagtacgactaccaatcctaacaataatacgcaacaatcaaatacaacccctgatc

SEQ ID NO: 1006 - DNA, 1213 bp, Streptococcus pneumoniae strain StrR-03
accaagaagctcaaaaacatctgtgggatatctacaactccgatcaatacgtctcttaccctgacgatgatttgcaagtcgcatctacggtcgtagatgtttcaaatggtaaagtcatcgcccaacttggagctcgtcaccaagcaagtaacgtttcatttggtaccaaccaagctgtggaaaccaatcgtgactggggttctgctatgaaaccaatcaccgattatgcacctgccatagaatacggtgtttatgattccactgcaactatggttaatgatattccttataactatccgggaacaagcacacctgtctacaactgggatagagcatatttcggtaatattactctgcaatatgctcttcaacaatcacgaaatgtcacagccgttgagactttgaataaggtcggtctagatagagctaaaaccttccttaatggtcttggtatcgactatccaagcatgcattatgcaaacgccatttcaagtaatacaacagaatctaataaacaatacggagcaagtagtgaaaaaatggctgctgcttatgctgcctttgccaacggtggaatttaccacaaacccatgtatatcaataaggtcgtcttcagtgacggtagtaaaaaagaattttcagatgtaggtacacgagctatgaaagaaacaactgcttacatgatgaccgaaatgatgaaaactgtcttggcatacggaactggtcgtggagcctatctcccatggttagcgcaagctggtaagacaggtacttctaactacacagatgatgaaattgaaaaacacatcaagaacactggctatgtagctccagatgaaatgtttgttggttatactcgtaagtattctatggctgtatggacaggttattcgaatcgtttaactcctatcgttggagatggtttcctagttgcagctaaagtttatcgctcaatgataacgtatctgtctgaaggaagcaatccagaggattggaatataccagaggggctctacagaaatggagaattcgtatttaaaaatggtgctcgttctacgtggagctcacctgctccacaacaacccccatcaactgaaagttcaagctcatcatcagatagttcaacttcacagtctaactcaaccactccaagcacaaataatagtacgactaccaatcctaacaataatacgcaacaatcaaatacaacccc

SEQ ID NO: 1007 - DNA, 1218 bp, Streptococcus pneumoniae strain StrR-04
accaagaagctcaaaaacatctgtgggatatctacaactccgatcaatacgtctcttaccctgacgatgatttgcaagtcgcatctacggtcgtagatgtttcaaatggtaaagtcatcgcccaacttggagctcgtcaccaagcaagtaacgtttcatttggtaccaaccaagctgtggaaaccaatcgtgactggggttctgctatgaaaccaatcaccgattatgcacctgccatagaatacggtgtttatgattccactgcaactatggttaatgatattccttataactatccgggaacaagcacacctgtctacaactgggatagagcatatttcggtaatattactctgcaatatgctcttcaacaatcacgaaatgtcacagccgttgagactttgaataaggtcggtctagatagagctaaaaccttccttaatggtcttggtatcgactatccaagcatgcattatgcaaacgccatttcaagtaatacaacagaatctaataaacaatacggagcaagtagtgaaaaaatggctgctgcttatgctgcctttgcaaatggtggcacttactataaaccaatgtatatccataaagtcgtcttcagtgatggaagtaaaaaagagttctctaatgtcggaactcgtgccatgaaggaaacgacagcctatatgatgaccgacatgatgaaaacagtcttgacttatggaactgggcgtggagcctatcttccttggcttcctcaagctggtaaaacaggaacctctaactatacagatgaggaagttgaaaaccacatcaagaacactggctatgtagctccagatgaaatgtttgttggttatactcgtaagtattctatggctgtatggacaggttattcgaatcgtttaactcctatcgttggagatggtttcctagttgcagctaaagtttatcgctcaatgataacgtatctatcagaagatactcatccagaagactggacgatgccagacggacttttcagaaacggggaatttgtattcaaaaatggagctcgcccaatatggactgaaccctctactcaacaatcctcaacagctgaaagttcaagctcatcatcagatagttcaacttcacagtctagctcaaccactccaagcacaaataatagtacgactaccaatcctaacaataatacgcaacaatcaaatacaacccctgatc

SEQ ID NO: 1008 - DNA, 1223 bp, Streptococcus pneumoniae strain StrR-05
gtagaccaagaagctcaaaaacatctgtgggatatctacaactccgatcaatacgtctcttaccctgacgatgatttgcaagtcgcatctacggtcgtagatgtttcaaatggtaaagtcatcgcccaacttggagctcgtcaccaagcaagtaacgtttcatttggtaccaaccaagctgtggaaaccaatcgtgactggggttctgctatgaaaccaatcaccgattatgcacctgccatagaatacggtgtttatgattccactgcaactatggttaatgatattccttataactatccgggaacaagcacacctgtctacaactgggatagagcatatttcggtaatattactctgcaatatgctcttcaacaatcacgaaatgtcacagccgttgagactttgaataaggtcggtctagatagagctaaaaccttccttaatggtcttggtatcgactatccaagcatgcattatgcaaacgccatttcaagtaatacaacagaatctaataaacaatacggagcaagtagtgaaaaaatggctgctgcttatgctgcctttgcaaatggtggcacttactataaaccaatgtatatccataaagtcgtcttcagtgatggaagtaaaaaagagttctctaatgtcggaactcgtgccatgaaggaaacgacagcctatatgatgaccgacatgatgaaaacagtcttgacttatggaactgggcgtggagcctatcttccttggcttcctcaagctggtaaaacaggaacctctaactatacagatgaggaagttgaaaaccacatcaagaacactggctatgtagctccagatgaaatgtttgttggttatactcgtaagtattctatggctgtatggacaggttattcgaatcgtttaactcctatcgttggagatggtttcctagttgcagctaaagtttatcgctcaatgataacgtatctatcagaagatactcatccagaagactggacgatgccagacggacttttcagaaacggggaatttgtattcaaaaatggagctcgcccaatatggactgaaccctctactcaacaatcctcaacagctgaaagttcaagctcatcatcagatagttcaacttcacagtctagctcaaccactccaagcacaaataatagtacgactaccaatcctaacaataatacgcaacaatcaaatacaacccctgatca

SEQ ID NO: 1009 - DNA, 1214 bp, Streptococcus pneumoniae strain StrR-06
accaagaagctcaaaaacatctgtgggatatctacaactccgatcaatacgtctcttaccctgacgatgatttgcaagtcgcatctacggtcgtagatgtttcaaatggtaaagtcatcgcccaacttggagctcgtcaccaagcaagtaacgtttcatttggtaccaaccaagctgtggaaaccaatcgtgactggggttctgctatgaaaccaatcaccgattatgcacctgccatagaatacggtgtttatgattccactgcaactatggttaatgatattccttataactatccgggaacaagcacacctgtctacaactgggatagagcatatttcggtaatattactctgcaatatgctcttcaacaatcacgaaatgtcacagccgttgagactttgaataaggtcggtctagatagagctaaaaccttccttaatggtcttggtatcgactatccaagcatgcattatgcaaacgccatttcaagtaatacaacagaatctaataaacaatacggagcaagtagtgaaaaaatggctgctgcttatgctgcctttgcaaatggtggcacttactataaaccaatgtatatccataaagtcgtcttcagtgatggaagtaaaaaagagttctctaatgtcggaactcgtgccatgaaggaaacgacagcctatatgatgaccgacatgatgaaaacagtcttgacttatggaactgggcgtggagcctatcttccttggcttcctcaagctggtaaaacaggaacctctaactatacagatgaggaagttgaaaaccacatcaagaacactggctatgtagctccagatgaaatgtttgttggttatactcgtaagtattctatggctgtatggacaggttattcgaatcgtttaactcctatcgttggagatggtttcctagttgcagctaaagtttatcgctcaatgataacgtatctatcagaagatactcatccagaagactggacgatgccagacggacttttcagaaacggggaatttgtattcaaaaatggagctcgcccaatatggactgaaccctctactcaacaatcctcaacagctgaaagttcaagctcatcatcagatagttcaacttcacagtctagctcaaccactccaagcacaaataatagtacgactaccaatcctaacaataatacgcaacaatcaaatacaacccct

SEQ ID NO: 1010 - DNA, 1223 bp, Streptococcus pneumoniae strain StrR-07
ccaagaagctcaaaaacatctgtgggatatctacaactccgatcaatacgtctcttaccctgacgatgatttgcaagtcgcatctacggtcgtagatgtttcaaatggtaaagtcatcgcacaacttggtgctcgtcatcaagcaagtaatgtttcattcggtaccaaccaggccgtagaaaccaatcgtgactggggatcatcaatgaaaccaatcactgactatgctcccgctttagaatatggagtctatgactctactgcttctattgtacatgatgtcccttataactatcctggcactgatactccactctacaactgggatcatgtctactttggaaacattacaatccagtatgctcttcaacaatcacgaaatgtcacagccgttgagactttgaataaggtcggtctagatagagctaaaaccttccttaatggtcttggtatcgactatccaagcatgcattatgcaaacgccatttcaagtaacacaactgaatccaacaaaaaatatggtgcaagtagtgaaaaaatggctgctgcctacgctgcttttgctaatggtggtatttatcacaaaccaatgtatatcaataaaatcgtctttagtgatggtagcgaaaaagaattttctgatgctggtacacgagctatgaaagagactactgcctatatgatgactgaaatgatgaaaactgttttaacttacggaacaggacgtggagcctacctaccatggcttccacaagcaggtaagacaggtacttctaactatactgacgaagaaattgaaaagtatatcaagaacactggttacgtagctccagatgaaatgtttgtagggtatacccgtaaatatgcaatggctgtttggacaggatactcaaatcgtctaactccaatcatcggagatggtttccttgttgctggtaaagtctatcgttcaatgataacttacctttctgaagatgaccaacctggagattggacaatgccagatggcttgtatagaaatggagaattcgtatttaaaaatggtgctcgttctacgtggagctcacctgctccacaacaacccccatcaactgaaagttcaagctcatcatcagatagttcaacttcacagtctaactcaaccactccaagcacaaataatagtacgactaccaatcctaacaataatacgcaacaatcaaatacaacccctgatcaacaaa

SEQ ID NO: 1011 - DNA, 1207 bp, Streptococcus pneumoniae strain StrR-08
aagctcaaaaacatctgtgggatatctacaactccgatcaatacgtctcttaccctgacgatgatttgcaagtcgcatctacggtcgtagatgtttcaaatggtaaagtcatcgcccaacttggagctcgtcaccaagcaagtaacgtttcatttggtaccaaccaagctgtggaaaccaatcgtgactggggttctgctatgaaaccaatcaccgattatgcacctgccatagaatacggtgtttatgattccactgcaactatggttaatgatattccttataactatccgggaacaagcacacctgtctacaactgggatagagcatatttcggtaatattactctgcaatatgctcttcaacaatcacgaaatgtcacagccgttgagactttgaataaggtcggtctagatagagctaaaaccttccttaatggtcttggtatcgactatccaagcatgcattatgcaaacgccatttcaagtaatacaacagaatctaataaacaatacggagcaagtagtgaaaaaatggctgctgcttatgctgcctttgcaaatggtggcacttactataaaccaatgtatatccataaagtcgtcttcagtgatggaagtaaaaaagagttctctaatgtcggaactcgtgccatgaaggaaacgacagcctatatgatgaccgacatgatgaaaacagtcttgacttatggaactgggcgtggagcctatcttccttggcttcctcaagctggtaaaacaggaacctctaactatacagatgaggaagttgaaaaccacatcaagaacactggctatgtagctccagatgaaatgtttgttggttatactcgtaagtattctatggctgtatggacaggttattcgaatcgtttaactcctatcgttggagatggtttcctagttgcagctaaagtttatcgctcaatgataacgtatctatcagaagatactcatccagaagactggacgatgccagacggacttttcagaaacggggaatttgtattcaaaaatggagctcgcccaatatggactgaaccctctactcaacaatcctcaacagctgaaagttcaagctcatcatcagatagttcaacttcacagtctagctcaaccactccaagcacaaataatagtacgactaccaatcctaacaataatacgcaacaatcaaatacaacccc

SEQ ID NO: 1012 - DNA, 1201 bp, Streptococcus pneumoniae strain StrR-09
aagctcaaaaacatctgtgggatatctacaactccgatcaatacgtctcttaccctgacgatgatttgcaagtcgcatctacggtcgtagatgtttcaaatggtaaagtcatcgcccaacttggagctcgtcaccaagcaagtaacgtttcatttggtaccaaccaagctgtggaaaccaatcgtgactggggttctgctatgaaaccaatcaccgattatgcacctgccatagaatacggtgtttatgattccactgcaactatggttaatgatattccttataactatccgggaacaagcacacctgtctacaactgggatagagcatatttcggtaatattactctgcaatatgctcttcaacaatcacgaaatgtcacagccgttgagactttgaataaggtcggtctagatagagctaaaaccttccttaatggtcttggtatcgactatccaagcatgcattatgcaaacgccatttcaagtaatacaacagaatctaataaacaatacggagcaagtagtgaaaaaatggctgctgcttatgctgcctttgccaacggtggaatttaccacaaacccatgtatatcaataaggtcgtcttcagtgacggtagtaaaaaagaattttcagatgtaggtacacgagctatgaaagaaacaactgcttacatgatgaccgaaatgatgaaaactgtcttggcatacggaactggtcgtggagcctatctcccatggttagcgcaagctggtaagacaggtacttctaactacacagatgatgaaattgaaaaacacatcaagaacactggctatgtagctccagatgaaatgtttgttggttatactcgtaagtattctatggctgtatggacaggttattcgaatcgtttaactcctatcgttggagatggtttcctagttgcagctaaagtttatcgctcaatgataacgtatctatcagaagatactcatccagaagactggacgatgccagacggacttttcagaaacggggaatttgtattcaaaaatggagctcgttctacgtggaactcacctgctccacaacaacccccatcaactgaaagttcaagctcatcatcagatagttcaacttcacagtctagctcaaccactccaagcacaaataatagtacgactaccgatcctaacaataatacgcaacaatcaaatac

SEQ ID NO: 1013 - DNA, 1220 bp, Streptococcus pneumoniae strain StrR-10
tgtagaccaagaagctcaaaaacatctgtgggatatctacaactccgatcaatacgtctcttaccctgacgatgatttgcaagtcgcatctacggtcgtagatgtttcaaatggtaaagtcatcgcacaacttggtgctcgtcatcaagcaagtaatgtttcattcggtaccaaccaggccgtagaaaccaatcgtgactggggatcatcaatgaaaccaatcactgactatgctcccgctttagaatatggagtctatgactctactgcttctattgtacatgatgtcccttataactatcctggcactgatactccactctacaactgggatcatgtctactttggaaacattacaatccagtatgctcttcaacaatcacgaaatgtcacagccgttgagactttgaataaggtcggtctagatagagctaaaaccttccttaatggtcttggtatcgactatccaagcatgcattatgcaaacgccatttcaagtaacacaactgaatccaacaaaaaatatggtgcaagtagtgaaaaaatggctgctgcctacgctgcttttgctaatggtggtatttatcacaaaccaatgtatatcaataaaatcgtctttagtgatggtagcgaaaaagaattttctgatgctggtacacgagctatgaaagagactactgcctatatgatgactgaaatgatgaaaactgttttaacttacggaacaggacgtggagcctacctaccatggcttccacaagcaggtaagacaggtacttctaactatactgacgaagaaattgaaaagtatatcaagaacactggctacgtagctccagatgaaatgtttgtgggttatactcgtaagtattctatggctgtatggacaggttattcgaatcgtttaactcctatcgttggagatggtttcctagttgcagctaaagtttatcgctctatgatgacctacctgtctgaaggaagcaatccagaggattggaatataccagaggggctctacagaaatggagaattcgtatttaaaaatggtgctcgttctacgtggagctcacctgctccacaacaacccccatcaactgaaagttcaagctcatcatcagatagttcaacttcacagtctagctcaaccactccaagcacaaataatagtacgactaccaatcctaacaataatacgcaacaatcaaatacaacccctg

SEQ ID NO: 1014 - DNA, 1199 bp, Streptococcus pneumoniae strain StrR-11
caaaaacatctgtgggatatttacaatacagacgaatacgttgcctatccagacgatgaattgcaagtcgcttctaccattgttgatgtttctaacggtaaagtcattgcccagctaggagcacgccatcagtcaagtaatgtttccttcggaattaaccaagcagtagaaacaaaccgcgactggggatcaactatgaaaccgatcacagactatgctcctgccttggagtacggtgtctacgattcaactgctactatcgttcacgatgagccctataactaccctgggacaaatacccctgtttataactgggataggggctactttggcaacatcaccttgcaatacgccctgcaacaatcgcgaaacgtcccagccgtggaaactctaaacaaggtcggactcaaccgcgccaagactttcctaaatggtctcggaatcgactacccaagtattcactactcaaatgccatttcaagtaacacaaccgaatcagacaaaaaatatggagcaagtagtgaaaagatggctgctgcttacgctgcctttgcaaatggtggaacttactataaaccaatgtatatccataaagtcgtctttagtgatgggagtgaaaaagagttctctaatgtcggaactcgtgccatgaaggaaacgacagcctatatgatgaccgacatgatgaaaactgtcttagtatacggaatcggacgtggagcctacctaccttggcttccacaagcaggtaaaacaggtacttctaactatactgacgaagaaattgaaaagtatatcaagaacactggttacgtagctccagatgaaatgtttgtagggtatacccgcaaatatgcaatggctgtatggacaggctattctaaccgtctgacaccacttgtaggcgatggccttacggtcgctgctaaagtttaccgctctatgatgacctacctgtctgaaggaagcaatccagaggattggaatataccagaggggctctacagaaatggagaattcgtatttaaaaatggtgctcgttctacgtggaactcacctgctccacaacaacccccatcaactgaaagttcaagctcatcatcagatagttcaacttcacagtctagctcaaccactccaagcacaaataatagtacgactaccaatcctaacaataatacgcaacaatcaaatacaac

SEQ ID NO: 1015 - DNA, 1211 bp, Streptococcus pneumoniae strain StrR-12
aagctcaaaaacatctgtgggatatctacaactccgatcaatacgtctcttaccctgacgatgatttgcaagtcgcatctacggtcgtagatgtttcaaatggtaaagtcatcgcccaacttggagctcgtcaccaagcaagtaacgtttcatttggtaccaaccaagctgtggaaaccaatcgtgactggggttctgctatgaaaccaatcaccgattatgcacctgccatagaatacggtgtttatgattccactgcaactatggttaatgatattccttataactatccgggaacaagcacacctgtctacaactgggatagagcatatttcggtaatattactctgcaatatgctcttcaacaatcacgaaatgtcacagccgttgagactttgaataaggtcggtctagatagagctaaaaccttccttaatggtcttggtatcgactatccaagcatgcattatgcaaacgccatttcaagtaatacaacagaatctaataaacaatacggagcaagtagtgaaaaaatggctgctgcttatgctgcctttgccaacggtggaatttaccacaaacccatgtatatcaataaggtcgtcttcagtgacggtagtaaaaaagaattttcagatgtaggtacacgagctatgaaagaaacaactgcttacatgatgaccgaaatgatgaaaactgtcttggcatacggaactggtcgtggagcctatctcccatggttagcgcaagctggtaagacaggtacttctaactacacagatgatgaaattgaaaaacacatcaagaacactggctatgtagctccagatgaaatgtttgttggttatactcgtaagtattctatggctgtatggacaggttattcgaatcgtttaactcctatcgttggagatggtttcctagttgcagctaaagtttatcgctcaatgataacgtatctgtctgaaggaagcaatccagaggattggaatataccagaggggctctacagaaatggagaattcgtatttaaaaatggtgctcgttctacgtggagctcacctgctccacaacaacccccatcaactgaaagttcaagctcatcatcagatagttcaacttcacagtctaactcaaccactccaagcacaaataatagtacgactaccaatcctaacaataatacgcaacaatcaaatacaacccctgat

SEQ ID NO: 1016 - DNA, 1222 bp, Streptococcus pneumoniae strain StrR-13
gtagaccaagaagctcaaaaacatctgtgggatatctacaactccgatcaatacgtctcttaccctgacgatgatttgcaagtcgcatctacggtcgtagatgtttcaaatggtaaagtcatcgcacaacttggtgctcgtcatcaagcaagtaatgtttcattcggtaccaaccaggccgtagaaaccaatcgtgactggggatcatcaatgaaaccaatcactgactatgctcccgctttagaatatggagtctatgactctactgcttctattgtacatgatgtcccttataactatcctggcactgatactccactctacaactgggatcatgtctactttggaaacattacaatccagtatgctcttcaacaatcacgaaatgtcacagccgttgagactttgaataaggtcggtctagatagagctaaaaccttccttaatggtcttggtatcgactatccaagcatgcattatgcaaacgccatttcaagtaacacaactgaatccaacaaaaaatatggtgcaagtagtgaaaaaatggctgctgcctacgctgcttttgctaatggtggtatttatcacaaaccaatgtatatcaataaaatcgtctttagtgatggtagcgaaaaagaattttctgatgctggtacacgagctatgaaagagactactgcctatatgatgactgaaatgatgaaaactgttttaacttacggaacaggacgtggagcctacctaccatggcttccacaagcaggtaagacaggtacttctaactatactgacgaagaaattgaaaagtatatcaagaacactggctacgtagctccagatgaaatgtttgtgggttatactcgtaagtattctatggctgtatggacaggttattcgaatcgtttaactcctatcgttggagatggtttcctagttgcagctaaagtttatcgctctatgatgacctacctgtctgaaggaagcaatccagaggattggaatataccagaggggctctacagaaatggagaattcgtatttaaaaatggtgctcgttctacgtggagctcacctgctccacaacaacccccatcaactgaaagttcaagctcatcatcagatagttcaacttcacagtctagctcaaccactccaagcacaaataatagtacgactaccaatcctaacaataatacgcaacaatcaaatacaacccctgatc

SEQ ID NO: 1017 - DNA, 1229 bp, Streptococcus pneumoniae strain StrR-14
tgtagaccaagaagctcaaaaacatctgtgggatatttacaatacagacgaatacgttgcctatccagacgatgaattgcaagtcgcttctaccattgttgatgtttctaacggtaaagtcattgcccagctaggagcacgccatcagtcaagtaatgtttccttcggaattaaccaagcagtagaaacaaaccgcgactggggatcaactatgaaaccgatcacagactatgctcctgccttggagtacggtgtctacgattcaactgctactatcgttcacgatgagccctataactaccctgggacaaatacccctgtttataactgggataggggctactttggcaacatcaccttgcaatacgccctgcaacaatcgcgaaacgtcccagccgtggaaactctaaacaaggtcggactcaaccgcgccaagactttcctaaatggtctcggaatcgactacccaagtattcactactcaaatgccatttcaagtaacacaaccgaatcagacaaaaaatatggagcaagtagtgaaaagatggctgctgcttacgctgcctttgcaaatggtggaacttactataaaccaatgtatatccataaagtcgtctttagtgatgggagtgaaaaagagttctctaatgtcggaactcgtgccatgaaagaaacaactgcttacatgatgaccgaaatgatgaaaactgtcctggcatacggaagtggtcgtggagcctatctcccatggttagcgcaagctggtaagacaggtacttctaactacacagatgatgaaattgaaaaacacatcaagaacactggctatgtagctccagatgaaatgtttgttggttatactcgtaagtattctatggctgtatggacaggttattcgaatcgtttaactcctatcgttggagatggtttcctagttgcagctaaagtttatcgctcaatgataacgtatctatcaaaagatactcatccagaagactggacgatgccagacggacttttcagaaacggggaatttgtattcaaaaatggagctcgttctacgtggaactcacctgctccacaacaacccccatcaactgaaagttcaagctcatcatcagatagttcaacttcacagtctaactcaaccactccaagcacaaataatagtacgactaccaatcctaacaataatacgcaacaatcaaatacaacccctgatcaacaaa

SEQ ID NO: 1018 - DNA, 1225 bp, Streptococcus pneumoniae strain StrR-15
atgtagaccaagaggctcaaaaacgtctgtgggatatctacaactccgatcaatacgtctcttaccctgacgatgatttgcaagtcgcatctacggtcgtagatgtttcaaatggtaaagtcatcgcccaacttggagctcgtcaccaagcaagtaacgtttcatttggtaccaaccaagctgtggaaaccaaccgtgactggggatcaagcatgaaaccaatcactgattatgccccagccttagaatatggtgtatatgattccactgcaactatggttaatgatattccttataactatccgggcacaagcacacctgtctacaactgggatcgagcatattttggtaatattagcctgcaatatgcccttcaacaatctcgtaacgtgcctgccgttgaaacactaaacaaggttggtttagatagagccaaaactttcctaaatggtttgggaattgactatccaagtattcactactcaaatgctatttcaagtaatacaactgaatctagtaaacagtacggggcaagcagtgagaaaatggctgcggcttacgctgcattcgctaatggcggtatttaccacaaaccaatgtacatcaataaagttgtctttagtgatggtagcgaaaaagaattttctgatgctggtacacgagctatgaaagagactactgcctatatgatgactgaaatgatgaaaactgttttaacttacggaacaggacgtggagcctacctaccatggcttccacaagcaggtaagacaggtacttctaactatactgacgacgaaattgaaaagtatatcaagaacactggctacgtagctccagatgaaatgtttgtgggttatactcgtaagtattctatggctgtatggactggatactcaaatcgtttaactccaatcattggagatggtttcctagttgctgccaaagtttatcgctcaatgatatcgtatctatcagaagatgaccatcctggagattggacaatgcctgagggagtatacagaagtggagaattcgtatttaaaaatggtgctcgttctacgtggagctcccctgctccacaacaacccccatcaactgaaagttcaagctcatcatcagatagttcaacttcacagtctagcttaaccactccaagcacaaataatagtacgactaccaatcctaacaacaatacgcaacaatcaaatacaacccctgatca

SEQ ID NO: 1019 - DNA, 1439 bp, Streptococcus pneumoniae strain StrR-01
gcctctatttcaaaggagatgcctggcattagtatttctacttcttgggatcgaaaggttttggaaacttccctttcttctatagtagggagtgtatccagtgaaaaagctggtctcccagcggaagaagcagaatcctatcttaaaaaaggctattctctaaatgaccgtgttggaacctcctatttggaaaagcaatatgaagagaccttacaaggaaaacgctcggtaaaagaaatccatctggataaatatggcaatatggaaagcgtggacacaattgaggaaggtagtaagggaaacaatatcaaactgaccattgatttggccttccaagatagcgtggatgctttgctgaaaagttatttcaattccgagctaggaaatggtggagctaaatattctgaaggtgtctatgcagtcgcccttaacccaaaaacaggtgctgttttatccatgtcagggatcaaacatgacctgaaaacgggagagttgactcctgattccttgggaacggtaaccaatgtctttgtcccaggttcggttgtcaaggctgcgaccatcagctcaggttgggaaaatggtgttttatcaggaaaccaaaccttaacagatcagcctattgttttccaaggttcagctccaatttattcttggtataaattggcatatggatcttttcctattacagctgtggaagccttggagtattcatccaatgcttacatggttcaaaccgctcttggaatcatgggccagacctatcaaccaaatatgtttgttggaaccagcaatttggaaacagctatgggaaaacttcgtgcgacctttggcgaatatggcttgggggctgcgaccggaattgacctaccagatgaatctactggatttgttcccaaagagtatagctttgctaattacatcaccaattcctttgggcagtttgataactatacgcccatgcagttggctcagtatgtagcaactattgcaaataatggtgttcgtgtggctcctcgtattgttgaaggcatttatggtaataatgataagggaggactgggtgacttgattcagcaactgcaaccgacagagatgaataaggtcaatatatccgactccgatatgagcatcttgcaccaaggtttttatcaggttgcccatggtactagtggattgacaactggacgtgccttttcaaatggtgccttggtatccattagcggaaaaacaggtacagccgaaagctatgtggcagatggtcagcaagcaaccaataccaatgcggtggcctatgccccatctgataatccccaaatcgctgtcgcagtggtctttcctcataataccaatctaacaaatggtgtaggaccttccattgcgcgtgacattatcaatctgtatcaaaaataccatccaatgaactagaaaggaaatta

SEQ ID NO: 1020 - DNA, 1441 bp, Streptococcus pneumoniae strain StrR-02
gcctctatttcaaaggagatgcctggcattagtatttctacttcttgggatcgaaaggttttggaaacttccctttcttctatagtagggagtgtatccagtgaaaaagctggtctcccagcggaagaagcagaatcctatcttaaaaaaggctattctctaaatgaccgtgttggaacctcctatttggaaaagcaatatgaagagaccttacaaggaaaacgctcggtaaaagaaatccatctggataaatatggcaatatggaaagcgtggacacaattgaggaaggtagtaagggaaacaatatcaaactgaccattgatttggccttccaagatagcgtggatgctttgctgaaaagttatttcaattccgagctaggaaatggtggagctaaatattctgaaggtgtctatgcagtcgcccttaacccaaaaacaggtgctgttttatccatgtcagggatcaaacatgacctgaaaacgggagagttgactcctgattccttgggaacggtaaccaatgtctttgtcccaggttcggttgtcaaggctgcgaccatcagctcaggttgggaaaatggtgttttatcaggaaaccaaaccttaacagatcagcctattgttttccaaggttcagctccaatttattcttggtataaattggcatatggatcttttcctattacagctgtggaagccttggagtattcatccaatgcttacatggttcaaaccgctcttggaatcatgggccagacctatcaaccaaatatgtttgttggaaccagcaatttggaaacagctatgggaaaacttcgtgcgacctttggcgaatatggcttgggggctgcgaccggaattgacctaccagatgaatctactggatttgttcccaaagagtatagctttgctaattacatcaccaattcctttgggcagtttgataactatacgcccatgcagttggctcagtatgtagcaactattgcaaataatggtgttcgtgtggctcctcgtattgttgaaggcatttatggtaataatgataagggaggactgggtgacttgattcagcaactgcaaccgacagagatgaataaggtcaatatatccgactccgatatgagcatcttgcaccaaggtttttatcaggttgcccatggtactagtggattgacaactggacgtgccttttcaaatggtgccttggtatccattagcggaaaaacaggtacagccgaaagctatgtggcagatggtcagcaagcaaccaataccaatgcggtggcctatgccccatctgataatccccaaatcgctgtcgcagtggtctttcctcataataccaatctaacaaatggtgtaggaccttccattgcgcgtgacattatcaatctgtatcaaaaataccatccaatgaactagaaaggaaattatg

SEQ ID NO: 1021 - DNA, 1396 bp, Streptococcus pneumoniae strain StrR-03
tattgcctctatttcaaaggagatgcctggcattagtatttctacttcttgggatcgaaaggttttggaaacttccctttcttctatagtagggagtgtatccagtgaaaaagctggtctcccagcggaagaagcagaatcctatcttaaaaaaggctattctctaaatgaccgtgttggaacctcctatttggaaaagcaatatgaagagaccttacaaggaaaacgctcggtaaaagaaatccatctggataaatatggcaatatggaaagcgtggacacaattgaggaaggtagtaagggaaacaatatcaaactgaccattgatttggccttccaagatagcgtggatgctttgctgaaaagttatttcaattccgagctaggaaatggtggagctaaatattctgaaggtgtctatgcagtcgcccttaacccaaaaacaggtgctgttttatccatgtcagggatcaaacatgacctgaaaacgggagagttgactcctgattccttgggaacggtaaccaatgtctttgtcccaggttcggttgtcaaggctgcgaccatcagctcaggttgggaaaatggtgttttatcaggaaaccaaaccttaacagatcagcctattgttttccaaggttcagctccaatttattcttggtataaattggcatatggatcttttcctattacagctgtggaagccttggagtattcatccaatgcttacatggttcaaaccgctcttggaatcatgggccagacctatcaaccaaatatgtttgttggaaccagcaatttggaaacagctatgggaaaacttcgtgcgacctttggcgaatatggcttgggggctgcgaccggaattgacctaccagatgaatctactggatttgttcccaaagagtatagctttgctaattacatcaccaattcctttgggcagtttgataactatacgcccatgcagttggctcagtatgtagcaactattgcaaataatggtgttcgtgtggctcctcgtattgttgaaggcatttatggtaataatgataagggaggactgggtgacttgattcagcaactgcaaccgacagagatgaataaggtcaatatatccgactccgatatgagcatcttgcaccaaggtttttatcaggttgcccatggtactagtggattgacaactggacgtgccttttcaaatggtgccttggtatccattagcggaaaaacaggtacagccgaaagctatgtggcagatggtcagcaagcaaccaataccaatgcggtggcctatgccccatctgataatccccaaatcgctgtcgcagtggtctttcctcataataccaatctaacaaatggtgtaggaccttccattgcgcgtgacatt

SEQ ID NO: 1022 - DNA, 1428 bp, Streptococcus pneumoniae strain StrR-04
aaaggagatgcctggcattagtatttctacttcttgggatcgaaaggttttggaaacttccctttcttctatagtagggagtgtatccagtgaaaaagctggtctcccagcggaagaagcagaatcctatcttaaaaaaggctattctctaaatgaccgtgttggaacctcctatttggaaaagcaatatgaagagaccttacaaggaaaacgctcggtaaaagaaatccatctggataaatatggcaatatggaaagcgtggacacaattgaggaaggtagtaagggaaacaatatcaaactgaccattgatttggccttccaagatagcgtggatgctttgctgaaaagttatttcaattccgagctaggaaatggtggagctaaatattctgaaggtgtctatgcagtcgcccttaacccaaaaacaggtgctgttttatccatgtcagggatcaaacatgacctgaaaacgggagagttgactcctgattccttgggaacggtaaccaatgtctttgtcccaggttcggttgtcaaggctgcgaccatcagctcaggttgggaaaatggtgttttatcaggaaaccaaaccttaacagatcagcctattgttttccaaggttcagctccaatttattcttggtataaattggcatatggatcttttcctattacagctgtggaagccttggagtattcatccaatgcttacatggttcaaaccgctcttggaatcatgggccagacctatcaaccaaatatgtttgttggaaccagcaatttggaaacagctatgggaaaacttcgtgcgacctttggcgaatatggcttgggggctgcgaccggaattgacctaccagatgaatctactggatttgttcccaaagagtatagctttgctaattacatcaccaattcctttgggcagtttgataactatacgcccatgcagttggctcagtatgtagcaactattgcaaataatggtgttcgtgtggctcctcgtattgttgaaggcatttatggtaataatgataagggaggactgggtgacttgattcagcaactgcaaccgacagagatgaataaggtcaatatatccgactccgatatgagcatcttgcaccaaggtttttatcaggttgcccatggtactagtggattgacaactggacgtgccttttcaaatggtgccttggtatccattagcggaaaaacaggtacagccgaaagctatgtggcagatggtcagcaagcaaccaataccaatgcggtggcctatgccccatctgataatccccaaatcgctgtcgcagtggtctttcctcataataccaatctaacaaatggtgtaggaccttccattgcgcgtgacattatcaatctgtatcaaaaataccatccaatgaactagaaaggaaatta

SEQ ID NO: 1023 - DNA, 1442 bp, Streptococcus pneumoniae strain StrR-05
tgcctctatttcaaaggagatgcctggcattagtatttctacttcttgggatcgaaaggttttggaaacttccctttcttctatagtagggagtgtatccagtgaaaaagctggtctcccagcggaagaagcagaatcctatcttaaaaaaggctattctctaaatgaccgtgttggaacctcctatttggaaaagcaatatgaagagaccttacaaggaaaacgctcggtaaaagaaatccatctggataaatatggcaatatggaaagcgtggacacaattgaggaaggtagtaagggaaacaatatcaaactgaccattgatttggccttccaagatagcgtggatgctttgctgaaaagttatttcaattccgagctaggaaatggtggagctaaatattctgaaggtgtctatgcagtcgcccttaacccaaaaacaggtgctgttttatccatgtcagggatcaaacatgacctgaaaacgggagagttgactcctgattccttgggaacggtaaccaatgtctttgtcccaggttcggttgtcaaggctgcgaccatcagctcaggttgggaaaatggtgttttatcaggaaaccaaaccttaacagatcagcctattgttttccaaggttcagctccaatttattcttggtataaattggcatatggatcttttcctattacagctgtggaagccttggagtattcatccaatgcttacatggttcaaaccgctcttggaatcatgggccagacctatcaaccaaatatgtttgttggaaccagcaatttggaaacagctatgggaaaacttcgtgcgacctttggcgaatatggcttgggggctgcgaccggaattgacctaccagatgaatctactggatttgttcccaaagagtatagctttgctaattacatcaccaattcctttgggcagtttgataactatacgcccatgcagttggctcagtatgtagcaactattgcaaataatggtgttcgtgtggctcctcgtattgttgaaggcatttatggtaataatgataagggaggactgggtgacttgattcagcaactgcaaccgacagagatgaataaggtcaatatatccgactccgatatgagcatcttgcaccaaggtttttatcaggttgcccatggtactagtggattgacaactggacgtgccttttcaaatggtgccttggtatccattagcggaaaaacaggtacagccgaaagctatgtggcagatggtcagcaagcaaccaataccaatgcggtggcctatgccccatctgataatccccaaatcgctgtcgcagtggtctttcctcataataccaatctaacaaatggtgtaggaccttccattgcgcgtgacattatcaatctgtatcaaaaataccatccaatgaactagaaaggaaattatg

SEQ ID NO: 1024 - DNA, 1445 bp, Streptococcus pneumoniae strain StrR-06
ttgcctctatttcaaaggagatgcctggcattagtatttctacttcttgggatcgaaaggttttggaaacttccctttcttctatagtagggagtgtatccagtgaaaaagctggtctcccagcggaagaagcagaatcctatcttaaaaaaggctattctctaaatgaccgtgttggaacctcctatttggaaaagcaatatgaagagaccttacaaggaaaacgctcggtaaaagaaatccatctggataaatatggcaatatggaaagcgtggacacaattgaggaaggtagtaagggaaacaatatcaaactgaccattgatttggccttccaagatagcgtggatgctttgctgaaaagttatttcaattccgagctaggaaatggtggagctaaatattctgaaggtgtctatgcagtcgcccttaacccaaaaacaggtgctgttttatccatgtcagggatcaaacatgacctgaaaacgggagagttgactcctgattccttgggaacggtaaccaatgtctttgtcccaggttcggttgtcaaggctgcgaccatcagctcaggttgggaaaatggtgttttatcaggaaaccaaaccttaacagatcagcctattgttttccaaggttcagctccaatttattcttggtataaattggcatatggatcttttcctattacagctgtggaagccttggagtattcatccaatgcttacatggttcaaaccgctcttggaatcatgggccagacctatcaaccaaatatgtttgttggaaccagcaatttggaaacagctatgggaaaacttcgtgcgacctttggcgaatatggcttgggggctgcgaccggaattgacctaccagatgaatctactggatttgttcccaaagagtatagctttgctaattacatcaccaattcctttgggcagtttgataactatacacccatgcagttggctcagtatgtagcaactattgcaaataatggtgttcgtgtggctcctcgtattgttgaaggcatttatggtaataatgataagggaggactgggtgacttgattcagcaactgcaaccgacagagatgaataaggtcaatatatccgactccgatatgagcatcttgcaccaaggtttttatcaggttgcccatggtactagtggattgacaactggacgtgccttttcaaatggtgccttggtatccattagcggaaaaacaggtacagccgaaagctatgtggcagatggtcagcaagcaaccaataccaatgcggtggcctatgccccatctgataatccccaaatcgctgtcgcagtggtctttcctcataataccaatctaacaaatggtgtaggaccttccattgcgcgtgacattatcaatctgtatcaaaaataccatccaatgaactagaaaggaaattatgct

SEQ ID NO: 1025 - DNA, 1441 bp, Streptococcus pneumoniae strain StrR-07
ttgcctctatttcaaaggagatgcctggcattagtatttctacttcttgggatcgaaagattttggaaacttccctttcttctatagtagggagtgtatccagtgaaaaagctggtctcccagcggaagaagcagaatcctatcttaaaaaaggctattctctaaatgaccgtgttggaacctcgtatttggaaaagcaatatgaagagaccttacaaggaaaacgctcggtaaaagaaatccatctggataaatatggcaatatggaaagcgtggacacaattgaggaaggtagtaagggaaacaatatcaaactgaccattgatttggccttccaagatagcgtggatgctttgctgaaaagttatttcaattccgagctaggaaatggtggagccaagtattctgagggtgtgtatgcagtcgcccttaaccccaaaacaggtgctgttttgtctatgtcaggactcaaacatgacctgaaaacgggagagttgactcctgattccttgggaacggtaaccaatgtctttgtcccaggttcggttgtcaaggctgcgaccatcagctctggctgggaaaatggtgttttatcaggaaaccaaaccttaacagatcagcctattgttttccaaggttcagctccaatttattcttggtataaattggcatatggatcttttcctattacagctgtggaagccttggagtattcatccaatgcttacatggttcaaaccgctcttggaatcatgggccagacctatcaaccaaatatgtttgttggaaccagcaatttggaaacagctatgggaaaacttcgtgcgacctttggcgaatatggcttgggggctgcgaccggaattgacctaccagatgaatctactggatttgttcccaaagactatagctttgctaattacatcaccaatgcctttgggcagtttgataactatacgcccatgcagttggctcagtatgtagcaactattgcaaatgatggtgttcgtgtggctcctcgtattgttgaaggcatttatggtaataatgataagggaggactgggtgacttgattcagcaactgcaaccgacagagatgaataaggtcaatatatccgactccgatatgagtatcttgcaccaaggattttaccaagtatcgcatggaactagtccccttacgacaggacgggcgttttcagatggcgccactgtttctatcagtggtaagaccggtacaggtgaaagctatgtagctggtggtcaagaagctaataataccaatgccgtggcctatgctccaacagaaaatcctcaaattgcagttgcagtagtctttcctcataataccaatttaaccaaaaatgttgggccagcaattgctcgcgacattatcaatttatataaccaacaccatccaatgaattagaaaggaagcca

SEQ ID NO: 1026 - DNA, 1443 bp, Streptococcus pneumoniae strain StrR-08
tattgcctctatttcaaaggagatgcctggcattagtatttctacttcttgggatcgaaaggttttggaaacttccctttcttctatagtagggagtgtatccagtgaaaaagctggtctcccagcggaagaagcagaatcctatcttaaaaaaggctattctctaaatgaccgtgttggaacctcctatttggaaaagcaatatgaagagaccttacaaggaaaacgctcggtaaaagaaatccatctggataaatatggcaatatggaaagcgtggacacaattgaggaaggtagtaagggaaacaatatcaaactgaccattgatttggccttccaagatagcgtggatgctttgctgaaaagttatttcaattccgagctaggaaatggtggagctaaatattctgaaggtgtctatgcagtcgcccttaacccaaaaacaggtgctgttttatccatgtcagggatcaaacatgacctgaaaacgggagagttgactcctgattccttgggaacggtaaccaatgtctttgtcccaggttcggttgtcaaggctgcgaccatcagctcaggttgggaaaatggtgttttatcaggaaaccaaaccttaacagatcagcctattgttttccaaggttcagctccaatttattcttggtataaattggcatatggatcttttcctattacagctgtggaagccttggagtattcatccaatgcttacatggttcaaaccgctcttggaatcatgggccagacctatcaaccaaatatgtttgttggaaccagcaatttggaaacagctatgggaaaacttcgtgcgacctttggcgaatatggcttgggggctgcgaccggaattgacctaccagatgaatctactggatttgttcccaaagagtatagctttgctaattacatcaccaattcctttgggcagtttgataactatacgcccatgcagttggctcagtatgtagcaactattgcaaataatggtgttcgtgtggctcctcgtattgttgaaggcatttatggtaataatgataagggaggactgggtgacttgattcagcaactgcaaccgacagagatgaataaggtcaatatatccgactccgatatgagcatcttgcaccaaggtttttatcaggttgcccatggtactagtggattgacaactggacgtgccttttcaaatggtgccttggtatccattagcggaaaaacaggtacagccgaaagctatgtggcagatggtcagcaagcaaccaataccaatgcggtggcctatgccccatctgataatccccaaatcgctgtcgcagtggtctttcctcataataccaatctaacaaatggtgtaggaccttccattgcgcgtgacattatcaatctgtatcaaaaataccatccaatgaactagaaaggaaatta

SEQ ID NO: 1027 - DNA, 1443 bp, Streptococcus pneumoniae strain StrR-09
tattgcctctatttcaaaggagatgcctggcattagtatttctacttcttgggatagaaaggttttggaaacttccctttcttctatagttgggagtgtatccagtgaaaaagctggtctcccagcggaagaagcagaagcctatcttaaaaaaggctattctctaaatgatcgtgtaggaacctcctatttggaaaagcaatatgaagagaccttacaaggaaaacgctcggtaaaagaaatccatctggataaatatggcaatatggaaagcgtggatacaattgaggaaggtagtaagggaaacaatatcaaactgaccattgatttggctttccaagatagcgtggatgctttactgaaaagttatttcaattccgagctagaaaatggtggagccaagtattctgaaggtgtctatgcagtcgcccttaacccaaaaacaggtgctgttttgtctatgtcagggattaaacatgacttgaaaacgggagatttaacacctgattccttgggaacagtaaccaatgtctttgtcccgggttctgttgtcaaggcggcgaccatcagctctggttgggagaatggagtcttatcaggaaatcagaccttgacagaccaaccgattgtcttccaaggttcagctccgattaattcttggtacactcaggcttacgattcatttccgattacagcggtggaagccttggagtattcttctaatgcctatatggtccaaacagctctaggtcttatggggcagacctaccaacccaatatgtttgtcggcaccagcaatctagagtctgctatggggaaattgcgttcaacctttggtgaatatggcttgggctctgcgactgggattgacctaccagatgaatctactggatttgttcccaaagagtatagctttgctaattacattactaatgcctttgggcagtttgataactatacgccgatgcagttggctcagtatgtagcaactattgcaaatgatggtgttcgtgtggctcctcgtattgtggaaggcatttatggcaataatgataagggaggactgggtgacttgattcagcaactgcaaccgacagagatgaataaggtcaatatatccgactccgatatgagtatcttgcaccaaggtttttatcaggttgctcatgggactagcggattgacaacaggtcgtgccttttccaatggtgcagctgtatccattagtggaaaaacaggtaccgccgaaagttatgtagcaggtggccaagaagccaacaatactaatgctgtagcctatgcaccatcagataatcctcaaatagctgttgctgttgtcttccctcataacaccaatctaacaaatggtgtaggaccttccattgcgcgtgatattatcaatctgtatcaaaaataccatccaatgaactagaaaggaattta

SEQ ID NO: 1028 - DNA, 1446 bp, Streptococcus pneumoniae strain StrR-10
tattgcctctatttcaaaggagatgcctggcattagtatttctacctcttgggatagaaaggttttggaaacttctctttcttctatagtagggagtgtatccagtgaaaaagctggtctcccagcggaagaagcagaagcctatcttaaaaaaggctattctctaaatgaccgtgttgggacttcttacctggaaaaacaatacgaggaaaccttacaaggaaaacgctcggtaaaagaaatccatctggataaatatggcaatatggaaagcgtggatacaattgaggaaggtagtaagggaaacaatatcaaactgaccattgatttggccttccaagatagcgtggatgctttgctgaaaagttatttcaattccgagctaggaaatggtggagctaagtattctgaaggcgtgtatgcagtcgcccttaaccccaaaacaggtgctgttttgtctatgtcaggactcaaacatgacctgaaaacgggagacttgacgcctgattccttgggaacggtaaccaatgtctttgtcccagggtcagtagttaaggccgctaccatcagctcaggttgggaaaatggtgttttatcaggaaaccaaaccttaacagatcagcctattgttttccaaggttcagctccaatttattcttggtataaattggcatatggatcttttcctattacagctgtggaagccttggagtattcatctaatgcttacatggttcaaaccgctcttggaatcatgggccagacctatcaaccaaatatgtttgttggaaccagcaatttggaaacagctatgggaaaacttcgtgcgacctttggcgaatatggcttgggggctgcgaccggaattgacctaccagatgaatctactggatttgttcccaaagagtatagctttgctaattacattactaatgcctttgggcagtttgataactatacgccgatgcagttggctcagtatgtagcaactattgcaaatgatggtgttcgtgtggctcctcgtattgttgaaggcatttatggtaataatgataagggaggactgggtgacttgattcagcaactgcaaccgacagagatgaataaggtcaatatatccgactccgatatgagcatcttgcaccaaggtttttatcaggttgcccatggtactagtggattgacaactggacgtgccttttcaaatggcgccttggtatccattagcggaaaaacaggtacagccgaaagctatgtggcagatggtcagcaagcaaccaataccaatgcggtggcctatgccccatctgataatccccaaatcgctgttgcagtggtctttcctcataataccaatctaacaaatggtgtaggaccttccattgcgcgtgacattatcaatctgtatcaaaaataccatccaatgaactagaaaggaaattatgc

SEQ ID NO: 1029 - DNA, 1423 bp, Streptococcus pneumoniae strain StrR-11
ttgcctctatttcaaaggagatgcctggcattagtatttctacttcttgggatagaaaggttttggaaacttccctttcttctatagttgggagtgtatccagtgaaaaagctggtctcccagcggaagaagcagaagcctatcttaaaaaaggctattctctaaatgaccgtgtaggaacctcctatttggaaaagcaatatgaagagaccttacaaggaaaacgctcggtaaaagaaatccatctggataaatatggcaatatggaaagcgtggatacaattgaggaaggtagtaagggaaacaatatcaaactgaccattgatttggccttccaagatagcgtggatgctttactgaaaagttatttcaattctgagctagaaaatggtggagccaagtattctgaaggtgtctatgcagtcgcccttaacccaaaaacaggtgcggttttgtctatgtcagggattaaacatgacttgaaaacgggagagttgacgcctgattccttgggaacggtaaccaatgtctttgttccaggttcggttgtcaaggcggcgaccatcagctcaggttgggaaaatggagtcttgtcaggaaaccagaccttgacagaccagtccattgtcttccaaggttcagctcccatcaattcttggtatactcaggcttacggttcattccctatcacagcggtccaagctctggagtattcatccaatgcttatatggtccaaacagccttaggtcttatggggcagacctatcaacccaatatgtttgtcggcaccagcaatctagagtctgctatgggtaaattgcgttcaacctttggcgaatatggcttgggggctgcgactgggattgatctaccagatgaatctactggatttgttcccaaagactataactttgccaatttcattaccaatgcctttgggcagtttgataactataccccaatgcaattggctcagtatgtagcaactattgcaaatgatggtgttcgtgtggctcctcgtattgttgaaggcatttatggtaataatgataagggaggactgggtgacttgattcagcaactgcaaccgacagagatgaataaggtcaatatatccgactccgatatgagtgtcttgcaccaaggtttttatcaggttgctcatgggactagtgggttgacaactggccgtgccttttcaaatggtgccttggtatccattagcggaaaaacgggtacagccgaaagctatgtggcagatggtcaggaagcaaccaataccaatgcggtggcctatgccccatctgataatccccaaatcgctgtcgcagtggtctttcctcataataccaatctaacaaatggtgtaggaccttccattgcgcgtgacattatcaatctgtatcaaaaataccatccaat

SEQ ID NO: 1030 - DNA, 1447 bp, Streptococcus pneumoniae strain StrR-12
tattgcctctatttcaaaggagatgcctggcattagtatttctacttcttgggatcgaaaggttttggaaacttccctttcttctatagtagggagtgtatccagtgaaaaagctggtctcccagcggaagaagcagaatcctatcttaaaaaaggctattctctaaatgaccgtgttggaacctcctatttggaaaagcaatatgaagagaccttacaaggaaaacgctcggtaaaagaaatccatctggataaatatggcaatatggaaagcgtggacacaattgaggaaggtagtaagggaaacaatatcaaactgaccattgatttggccttccaagatagcgtggatgctttgctgaaaagttatttcaattccgagctaggaaatggtggagctaaatattctgaaggtgtctatgcagtcgcccttaacccaaaaacaggtgctgttttatccatgtcagggatcaaacatgacctgaaaacgggagagttgactcctgattccttgggaacggtaaccaatgtctttgtcccaggttcggttgtcaaggctgcgaccatcagctcaggttgggaaaatggtgttttatcaggaaaccaaaccttaacagatcagcctattgttttccaaggttcagctccaatttattcttggtataaattggcatatggatcttttcctattacagctgtggaagccttggagtattcatccaatgcttacatggttcaaaccgctcttggaatcatgggccagacctatcaaccaaatatgtttgttggaaccagcaatttggaaacagctatgggaaaacttcgtgcgacctttggcgaatatggcttgggggctgcgaccggaattgacctaccagatgaatctactggatttgttcccaaagagtatagctttgctaattacatcaccaattcctttgggcagtttgataactatacgcccatgcagttggctcagtatgtagcaactattgcaaataatggtgttcgtgtggctcctcgtattgttgaaggcatttatggtaataatgataagggaggactgggtgacttgattcagcaactgcaaccgacagagatgaataaggtcaatatatccgactccgatatgagcatcttgcaccaaggtttttatcaggttgcccatggtactagtggattgacaactggacgtgccttttcaaatggtgccttggtatccattagcggaaaaacaggtacagccgaaagctatgtggcagatggtcagcaagcaaccaataccaatgcggtggcctatgccccatctgataatccccaaatcgctgtcgcagtggtctttcctcataataccaatctaacaaatggtgtaggaccttccattgcgcgtgacattatcaatctgtatcaaaaataccatccaatgaactagaaaggaaattatgct

SEQ ID NO: 1031 - DNA, 1446 bp, Streptococcus pneumoniae strain StrR-13
attgcctctatttcaaaggagatgcctggcattagtatttctacctcttgggatagaaaggttttggaaacttctctttcttctatagtagggagtgtatccagtgaaaaagctggtctcccagcggaagaagcagaagcctatcttaaaaaaggctattctctaaatgaccgtgttgggacttcttacctggaaaaacaatacgaggaaaccttacaaggaaaacgctcggtaaaagaaatccatctggataaatatggcaatatggaaagcgtggatacaattgaggaaggtagtaagggaaacaatatcaaactgaccattgatttggccttccaagatagcgtggatgctttgctgaaaagttatttcaattccgagctaggaaatggtggagctaagtattctgaaggcgtgtatgcagtcgcccttaaccccaaaacaggtgctgttttgtctatgtcaggactcaaacatgacctgaaaacgggagacttgacgcctgattccttgggaacggtaaccaatgtctttgtcccagggtcagtagttaaggccgctaccatcagctcaggttgggaaaatggtgttttatcaggaaaccaaaccttaacagatcagcctattgttttccaaggttcagctccaatttattcttggtataaattggcatatggatcttttcctattacagctgtggaagccttggagtattcatctaatgcttacatggttcaaaccgctcttggaatcatgggccagacctatcaaccaaatatgtttgttggaaccagcaatttggaaacagctatgggaaaacttcgtgcgacctttggcgaatatggcttgggggctgcgaccggaattgacctaccagatgaatctactggatttgttcccaaagagtatagctttgctaattacattactaatgcctttgggcagtttgataactatacgccgatgcagttggctcagtatgtagcaactattgcaaatgatggtgttcgtgtggctcctcgtattgttgaaggcatttatggtaataatgataagggaggactgggtgacttgattcagcaactgcaaccgacagagatgaataaggtcaatatatccgactccgatatgagcatcttgcaccaaggtttttatcaggttgcccatggtactagtggattgacaactggacgtgccttttcaaatggcgccttggtatccattagcggaaaaacaggtacagccgaaagctatgtggcagatggtcagcaagcaaccaataccaatgcggtggcctatgccccatctgataatccccaaatcgctgttgcagtggtctttcctcataataccaatctaacaaatggtgtaggaccttccattgcgcgtgacattatcaatctgtatcaaaaataccatccaatgaactagaaaggaaattatgct

SEQ ID NO: 1032 - DNA, 1446 bp, Streptococcus pneumoniae strain StrR-14
attgcctctatttcaaaggagatgcctggcattagtatttctacttcttgggatagaaaggttttggaaacttccctttcttctatagttgggagtgtatccagtgaaaaagctggtctcccagcggaagaagcagaagcctatcttaaaaaaggctattctctaaatgatcgtgttggaacctcctatttggaaaagcaatatgaagagaccttacaagggaaacgctcggtaaaagaaatccatctggataaatatggcaatatggaaagtgtggatacaattgaggaaggtagtaagggaaacaatatcaagctgaccattgatttggccttccaagatagcgtggatgctttgctgaaaagttatttcaattccgagctaggaaatggtggagccaagtattctgagggtgtgtatgcagtcgcccttaaccccaaaacaggtgctgttttgtctatgtcaggactcaaacatgacctgaaaacgggagagttgactcctgattccttgggaacggtaaccaatgtctttgtcccaggttcggttgtcaaggctgcgaccatcagctctggctgggaaaatggagtcttatcaggaaaccagaccttgacagaccagtccattgtctttcaaggttcagctcccatcaattcttggtatactcaggcttacggttcattccctatcacagcagtccaagctctggagtattcatctaatgcctatatggtccaaacagctttaggtcttatggggcagacctaccaacctaatatgtttgtcggcaccagcaacctagagtctgctatggggaaattgcgttcaacctttggtgaatatggtttgggttctgcgaccgggattgacctaccagatgaatctactggatttgttcccaaagactatagctttgctaattacatcaccaatgcctttgggcagtttgataactatacgccgatgcagttggctcagtatgtagcaactattgcaaatgatggtgttcgtgtggctcctcgtattgttgaaggcatttatggaaataatgataagggaggcctaggcgacttgattcagcaactgcaaccgacagagatgaataaggtcaatatatccgactctgatatgagtattttgcaccaaggtttttatcaggttgctcatgggactagtggattgacaactggacgtgccttttcaaatggcgcagcggtatccattagtggaaaaacaggtactgccgaaagttatgttgagggtggtcaagaagctaacaatactaatgctgtggcctatgcaccatcagataatcctcaaatcgctgtagctgttgtcttccctcataacaccaaccttacaaatggtgtcggaccttccattgcgcgcgatattatcaacctctataaccaacatcatccaatgaattagaaaggaacatatgct

SEQ ID NO: 1033 - DNA, 1446 bp, Streptococcus pneumoniae strain StrR-15
tattgcctctatttcaaaggagatgcctggcattagtatttctacttcttgggatagaaaggttttggaaacttccctttcttctatagttgggagtgtatccagtgaaaaagctggtctcccagcggaagaagcagaagcctatcttaaaaaaggctattctctaaatgaccgtgttggaacctcgtatttggaaaagcaatatgaagagaccttacaaggaaaacgctcggtaaaagaaatccatctggataaatatggcaatatggaaagcgtggatacaattgaggaaggtagtaagggaaacaatatcaagctgaccattgatttggccttccaagatagcgtggatgctttgctgaaaagttatttcaattccgagctaggaaatggtggagccaagtattctgagggtgtgtatgcagtcgcccttaaccccaaaacaggtgctgttttgtctatgtcaggactcaaacatgacctgaaaacgggagagttgactcctgattccttgggaacggtaaccaatgtctttgtcccaggttcggttgttaaggccgctaccatcagctcaggttgggaaaatggtgttttatcaggaaaccaaaccttaacagatcagcctattgttttccaaggttcagctccaatttattcttggtataaattggcatatggatcttttcctattacagctgtggaagccttggagtattcatccaatgcttacatggttcaaaccgctcttggaatcatgggccagacctatcaaccaaatatgtttgttggaaccagcaatttggaaacagctatgggaaaacttcgtgcgacctttggcgaatatggcttgggggctgcgaccggaattgacctaccagatgaatctactggatttgttcccaaagagtatagctttgctaattacatcaccaatgcctttgggcagtttgataactatacgcccatgcagttggctcagtatgtagcaactattgcaaatgatggtgttcgtgtggctcctcgtattgttgaaggcatttatggtaataatgataagggaggactgggtgacttgattcagcaactgcaaccgacagagatgaataaggtcaatatatccgactccgatatgagtatcttgcaccaaggtttttatcaggttgctcatgggactagtggattgacaactggacgtgctttttcaaatggtgccttggtatccattagtgggaaaacaggtactgccgaaagttatgttgcaggtggtcaagaagccaacaataccaacgcggtggcctatgccccatcagataatcctcaaatcgctgttgccgttgtcttccctcataacaccaatctaacaaatggtgttggaccttctattgcacgcgatattatcaacctctataaccaacaccatccaatgaattagaaaggaacttatgc

SEQ ID NO: 1034 - DNA, 1670 bp, Streptococcus pneumoniae strain StrR-01
ggaaactgcagaggtcaaggggattgattttacaaccagtcccaatcgtagttatccaaacggacaatttgcttctagttttatcggactagctcagctccatgaaaatgaagatggcagcaagagcttactgggaacctctggaatggagagttccttgaacagtattcttgcagggacagacggtattattacctatgaaaaagaccgtgtaggaaatatcgtaccaggtacagaactggtatcgcaacaaactgtggatggcaaggatgtttatacaacattgtctagtccgctacaatctttcatggaaactcagatggatgcctttctagaaaaagtaaaaggtaagtatatgaccgcgaccttggtcagtgcaaagaccggtgaaatcctcgctaccacccaacgacctacctttaatgcagatactaaagaaggaatcactgaggactttgtttggcgtgatattctttatcaaagtaactatgaaccaggatcagccatgaaggttatgacgttagcttcttctattgataataataccttcccaagtggagaatacttcaatagcagtgaattcaaaatagcggatgcgacgactcgagattgggatgttaatgatggtttgactactggtgggatgatgactttcttacaaggtttcgctcactccagtaatgttggaatgagtctacttgaacaaaaaatgggagatgctacttggttggattatctaaaacgctttaaatttggggttccaactcgctttggcttgacagatgaatacgctggtcaacttccagctgataatattgttagtattgctcaaagctcatttgggcaaggaatttcagtgacacaaacacaaatgcttcgtgcctttacagctattgctaatgatggagttatgctggagccaaaatttataagtgctatttatgatactaacaatcagtctgtacgtaagtcacaaaaagaaatagtaggaaatcctgtttccaaagaggcagcaagcacaactcgaaatcacatgatcttagttgggacggaccctctatatggaactatgtataatcactacacaggaaagccaattataacagttcctggacaaaatgtagcagttaaatccggtacggctcaaatcgctgatgagaaaaatggaggatacttggttggttctaccaattatattttctcagttgtgactatgaatcctgctgaaaatcctgattttatcttgtatgtaacggttcaacagcctgagcattattcaggtatccagttgggagaatttgccaccccaatcttggagcgggcttcagctatgaaagaatctctcaatcttcaatctccagccaaaaatttagataaagttacgacagaatcttcttatgcaatgcctagcatcaaggatatttcacctggtgagttggcggaagccttacgccgaaatattgtgcaaccaatcgttgtaggtactggaacaaagattaaagagacttctgtagaagaagggaccaatcttgcaccaaaccaacaagttctccttttatcggataaggtagaagaaattccagacatgtatggctggaaaaaagagactgccgagacctttgctaaatggttggatattgaactggaatttgaaggttcaggttccgttg

SEQ ID NO: 1035 - DNA, 1683 bp, Streptococcus pneumoniae strain StrR-02
aaagaattggaaactgcagaggtcaaggggattgattttacaaccagtcccaatcgtagttacccaaatggacaatttgcttctagttttatcggtctagctcagctccatgaaaatgaagatggaagcaagagtttgctgggaacctctggaatggagagttccttgaacagtattcttgcagggacagacggcattattacctatgaaaaggatcgtctgggcaatattgtacccggaacagaacaagtttcccaacaaacggtggatggcaaggatgtttacacaaccatttccagccccctccagtccttcatggaaactcagatggatgcctttctagaaaaagtaaaaggtaagtatatgaccgcgaccttggtcagtgcaaagaccggtgaaatcctcgctaccacccaacgacctacctttaatgcagatactaaagaaggaatcactgaggactttgtttggcgtgatattctttatcaaagtaactatgaaccaggatcagccatgaaggttatgacgttagcttcttctattgataataataccttcccaagtggagaatacttcaatagcagtgaattcaaaatagcggatgcgacgactcgagattgggatgttaatgatggtttgactactggtgggatgatgactttcttacaaggtttcgctcactccagtaatgttggaatgagtctacttgaacaaaaaatgggagatgctacttggttggattatctaaaacgctttaaatttggggttccaactcgctttggcttgacagatgaatacgctggtcaacttccagctgataatattgttagtattgctcaaagctcatttgggcaaggaatttcagtgacacaaacacaaatgcttcgtgcctttacagctattgctaatgatggagttatgctggagccaaaatttataagtgctatttatgatactaacaatcagtctgtacgtaagtcacaaaaagaaatagtaggaaatcctgtttccaaagaggcagcaagcacaactcgaaatcacatgatcttagttgggacggaccctctatatggaactatgtataatcactacacaggaaagccaattataacagttcctggacaaaatgtagcagttaaatccggtacggctcaaatcgctgatgagaaaaatggaggatacttggttggttctaccaattatattttctcagttgtgactatgaatcctgctgaaaatcctgattttatcttgtatgtaacggttcaacagcctgagcattattcaggtatccagttgggagaatttgccaccccaatcttggagcgggcttcagctatgaaagaatctctcaatcttcaatctccagccaaaaatttagataaagttacgacagaatcttcttatgcaatgcctagcatcaaggatatttcacctggtgagttggcggaagccttacgccgaaatattgtgcaaccaatcgttgtaggtactggaacaaagattaaagagacttctgtagaagaagggaccaatcttgcaccaaaccaacaagttctccttttatcggataaggtagaagaaattccagacatgtatggctggaaaaaagagactgccgagacctttgctaaatggttggatattgaactggaatttgaaggttcaggttccgttgttcag

SEQ ID NO: 1036 - DNA, 1682 bp, Streptococcus pneumoniae strain StrR-03
tcaaaaaagaattggaaactgcagaggtcaaggggattgattttacaaccagtcccaatcgtagttacccaaatggacaatttgcttctagttttatcggtctagctcagctccatgaaaatgaagatggaagcaagagtttgctgggaacctctggaatggagagttccttgaacagtattcttgcagggacagacggcattattacctatgaaaaggatcgtctgggcaatattgtacccggaacagaacaagtttcccaacaaacggtggatggcaaggatgtttacacaaccatttccagccccctccagtccttcatggaaactcagatggatgcctttctagaaaaagtaaaaggtaagtatatgaccgcgaccttggtcagtgcaaagaccggtgaaatcctcgctaccacccaacgacctacctttaatgcagatactaaagaaggaatcactgaggactttgtttggcgtgatattctttatcaaagtaactatgaaccaggatcagccatgaaggttatgacgttagcttcttctattgataataataccttcccaagtggagaatacttcaatagcagtgaattcaaaatagcggatgcgacgactcgagattgggatgttaatgatggtttgactactggtgggatgatgactttcttacaaggtttcgctcactccagtaatgttggaatgagtctacttgaacaaaaaatgggagatgctacttggttggattatctaaaacgctttaaatttggggttccaactcgctttggcttgacagatgaatacgctggtcaacttccagctgataatattgttagtattgctcaaagctcatttgggcaaggaatttcagtgacacaaacacaaatgcttcgtgcctttacagctattgctaatgatggagttatgctggagccaaaatttataagtgctatttatgatactaacaatcagtctgtacgtaagtcacaaaaagaaatagtaggaaatcctgtttccaaagaggcagcaagcacaactcgaaatcacatgatcttagttgggacggaccctctatatggaactatgtataatcactacacaggaaagccaattataacagttcctggacaaaatgtagcagttaaatccggtacggctcaaatcgctgatgagaaaaatggaggatacttggttggttctaccaattatattttctcagttgtgactatgaatcctgctgaaaatcctgattttatcttgtatgtaacggttcaacagcctgagcattattcaggtatccagttgggagaatttgccaccccaatcttggagcgggcttcagctatgaaagaatctctcaatcttcaatctccagccaaaaatttagataaagttacgacagaatcttcttatgcaatgcctagcatcaaggatatttcacctggtgagttggcggaagccttacgccgaaatattgtgcaaccaatcgttgtaggtactggaacaaagattaaagagacttctgtagaagaagggaccaatcttgcaccaaaccaacaagttctccttttatcggataaggtagaagaaattccagacatgtatggctggaaaaaagagactgccgagacctttgctaaatggttggatattgaactggaatttgaaggttcaggttccgtt

SEQ ID NO: 1037 - DNA, 1681 bp, Streptococcus pneumoniae strain StrR-04
caaaaaagaattggaaactgcagaggtcaaggggattgattttacaaccagtcccaatcgtagttatccaaacggacaatttgcttctagttttatcggactagctcagctccatgaaaatgaagatggcagcaagagcttactgggaacctctggaatggagagttccttgaacagtattcttgcagggacagacggtattattacctatgaaaaagaccgtgtaggaaatatcgtaccaggtacagaactggtatcgcaacaaactgtggatggcaaggatgtttatacaacattgtctagtccgctacaatctttcatggaaactcagatggatgcctttctagaaaaagtaaaaggtaagtatatgaccgcgaccttggtcagtgcaaagaccggtgaaatcctcgctaccacccaacgacctacctttaatgcagatactaaagaaggaatcactgaggactttgtttggcgtgatattctttatcaaagtaactatgaaccaggatcagccatgaaggttatgacgttagcttcttctattgataataataccttcccaagtggagaatacttcaatagcagtgaattcaaaatagcggatgcgacgactcgagattgggatgttaatgatggtttgactactggtgggatgatgactttcttacaaggtttcgctcactccagtaatgttggaatgagtctacttgaacaaaaaatgggagatgctacttggttggattatctaaaacgctttaaatttggggttccaactcgctttggcttgacagatgaatacgctggtcaacttccagctgataatattgttagtattgctcaaagctcatttgggcaaggaatttcagtgacacaaacacaaatgcttcgtgcctttacagctattgctaatgatggagttatgctggagccaaaatttataagtgctatttatgatactaacaatcagtctgtacgtaagtcacaaaaagaaatagtaggaaatcctgtttccaaagaggcagcaagcacaactcgaaatcacatgatcttagttgggacggaccctctatatggaactatgtataatcactacacaggaaagccaattataacagttcctggacaaaatgtagcagttaaatccggtacggctcaaatcgctgatgagaaaaatggaggatacttggttggttctaccaattatattttctcagttgtgactatgaatcctgctgaaaatcctgattttatcttgtatgtaacggttcaacagcctgagcattattcaggtatccagttgggagaatttgccaccccaatcttggagcgggcttcagctatgaaagaatctctcaatcttcaatctccagccaaaaatttagataaagttacgacagaatcttcttatgcaatgcctagcatcaaggatatttcacctggtgagttggcggaagccttacgccgaaatattgtgcaaccaatcgttgtaggtactggaacaaagattaaagagacttctgtagaagaagggaccaatcttgcaccaaaccaacaagttctccttttatcggataaggtagaagaaattccagacatgtatggctggaaaaaagagactgccgagacctttgctaaatggttggatattgaactggaatttgaaggttcaggttccgtt

SEQ ID NO: 1038 - DNA, 1685 bp, Streptococcus pneumoniae strain StrR-05
aaaaaagaattggaaactgcagaggtcaaggggattgattttacaaccagtcccaatcgtagttatccaaacggacaatttgcttctagttttatcggactagctcagctccatgaaaatgaagatggcagcaagagcttactgggaacctctggaatggagagttccttgaacagtattcttgcagggacagacggtattattacctatgaaaaagaccgtgtaggaaatatcgtaccaggtacagaactggtatcgcaacaaactgtggatggcaaggatgtttatacaacattgtctagtccgctacaatctttcatggaaactcagatggatgcctttctagaaaaagtaaaaggtaagtatatgaccgcgaccttggtcagtgcaaagaccggtgaaatcctcgctaccacccaacgacctacctttaatgcagatactaaagaaggaatcactgaggactttgtttggcgtgatattctttatcaaagtaactatgaaccaggatcagccatgaaggttatgacgttagcttcttctattgataataataccttcccaagtggagaatacttcaatagcagtgaattcaaaatagcggatgcgacgactcgagattgggatgttaatgatggtttgactactggtgggatgatgactttcttacaaggtttcgctcactccagtaatgttggaatgagtctacttgaacaaaaaatgggagatgctacttggttggattatctaaaacgctttaaatttggggttccaactcgctttggcttgacagatgaatacgctggtcaacttccagctgataatattgttagtattgctcaaagctcatttgggcaaggaatttcagtgacacaaacacaaatgcttcgtgcctttacagctattgctaatgatggagttatgctggagccaaaatttataagtgctatttatgatactaacaatcagtctgtacgtaagtcacaaaaagaaatagtaggaaatcctgtttccaaagaggcagcaagcacaactcgaaatcacatgatcttagttgggacggaccctctatatggaactatgtataatcactacacaggaaagccaattataacagttcctggacaaaatgtagcagttaaatccggtacggctcaaatcgctgatgagaaaaatggaggatacttggttggttctaccaattatattttctcagttgtgactatgaatcctgctgaaaatcctgattttatcttgtatgtaacggttcaacagcctgagcattattcaggtatccagttgggagaatttgccaccccaatcttggagcgggcttcagctatgaaagaatctctcaatcttcaatctccagccaaaaatttagataaagttacgacagaatcttcttatgcaatgcctagcatcaaggatatttcacctggtgagttggcggaagccttacgccgaaatattgtgcaaccaatcgttgtaggtactggaacaaagattaaagagacttctgtagaagaagggaccaatcttgcaccaaaccaacaagttctccttttatcggataaggtagaagaaattccagacatgtatggctggaaaaaagagactgccgagacctttgctaaatggttggatattgaactggaatttgaaggttcaggttccgttgttca

SEQ ID NO: 1039 - DNA, 1679 bp, Streptococcus pneumoniae strain StrR-06
aaaagaattggaaactgcagaggtcaaggggattgattttacaaccagtcccaatcgtagttatccaaacggacaatttgcttctagttttatcggactagctcagctccatgaaaatgaagatggcagcaagagcttactgggaacctctggaatggagagttccttgaacagtattcttgcagggacagacggtattattacctatgaaaaagaccgtgtaggaaatatcgtaccaggtacagaactggtatcgcaacaaactgtggatggcaaggatgtttatacaacattgtctagtccgctacaatctttcatggaaactcagatggatgcctttctagaaaaagtaaaaggtaagtatatgaccgcgaccttggtcagtgcaaagaccggtgaaatcctcgctaccacccaacgacctacctttaatgcagatactaaagaaggaatcactgaggactttgtttggcgtgatattctttatcaaagtaactatgaaccaggatcagccatgaaggttatgacgttagcttcttctattgataataataccttcccaagtggagaatacttcaatagcagtgaattcaaaatagcggatgcgacgactcgagattgggatgttaatgatggtttgactactggtgggatgatgactttcttacaaggtttcgctcactccagtaatgttggaatgagtctacttgaacaaaaaatgggagatgctacttggttggattatctaaaacgctttaaatttggggttccaactcgctttggcttgacagatgaatacgctggtcaacttccagctgataatattgttagtattgctcaaagctcatttgggcaaggaatttcagtgacacaaacacaaatgcttcgtgcctttacagctattgctaatgatggagttatgctggagccaaaatttataagtgctatttatgatactaacaatcagtctgtacgtaagtcacaaaaagaaatagtaggaaatcctgtttccaaagaggcagcaagcacaactcgaaatcacatgatcttagttgggacggaccctctatatggaactatgtataatcactacacaggaaagccaattataacagttcctggacaaaatgtagcagttaaatccggtacggctcaaatcgctgatgagaaaaatggaggatacttggttggttctaccaattatattttctcagttgtgactatgaatcctgctgaaaatcctgattttatcttgtatgtaacggttcaacagcctgagcattattcaggtatccagttgggagaatttgccaccccaatcttggagcgggcttcagctatgaaagaatctctcaatcttcaatctccagccaaaaatttagataaagttacgacagaatcttcttatgcaatgcctagcatcaaggatatttcacctggtgagttggcggaagccttacgccgaaatattgtgcaaccaatcgttgtaggtactggaacaaagattaaagagacttctgtagaagaagggaccaatcttgcaccaaaccaacaagttctccttttatcggataaggtagaagaaattccagacatgtatggctggaaaaaagagactgccgagacctttgctaaatggttggatattgaactggaatttgaaggttcaggttccgttg

SEQ ID NO: 1040 - DNA, 1685 bp, Streptococcus pneumoniae strain StrR-07
taaaaaggatctaaaagacgctagtgttgaaggaattgacttcacaactagccctaatagaagctatccaaatggacaattcgcttctagttttattggtttggcccaactccatgaaaatgaggatggtagcaagagtttgctgggaacttctgggatggagagttccttgaacagtattcttgcagggaaagacggtattattacctatgaaaaagatcgtctgggtaatattgtccctggaacagaacaagtttcccaacaaacggtagatggcaaggatgtttatacaacattgtctagtccgctacaatctttcatggaaactcagatggatgcctttctagaaaaagtaaaaggtaagtatatgaccgcgaccttggtcagtgcaaagaccggtgaaatcctcgctaccacccaacgacctacctttaatgcagatactaaagaaggaatcactgaggactttgtttggcgtgatattctttatcaaagtaactatgaaccaggatcagccatgaaggttatgacgttagcttcttctattgataataataccttcccaagtggagaatacttcaatagcagtgaattcaaaatagcggatgcgacgactcgagattgggatgttaatgaaggtttgactactggtgggatgatgactttcttacaaggtttcgctcactccagtaatgttggaatgagtctacttgaacaaaaaatgggagatgctacttggttggattatctaaaacgctttaaatttggggttccaactcgctttggcttgacagatgaatacgctggtcaacttccagctgataatattgttagtattgctcaaagctcatttgggcaaggaatttcagtgacacaaacacaaatgcttcgtgcctttacagctattgctaatgatggagttatgctggagccaaaatttataagtgctatttatgatactaacaatcagtctgtacgtaagtcacaaaaagaaatagtaggaaatcctgtttccaaagaggcagcaagcacaactcgaaatcacatgatcttagttgggacggaccctctatatggaactatgtataatcactacacaggaaagccaattataacagttcctggacaaaatgtagcagttaaatccggtacggctcaaatcgctgatgagaaaaatggaggatacttggttggttctaccaattatattttctcagctgtgactatgaatcctgctgaaaatcctgattttatcttgtatgtaacggttcaacagcctgagcattattcaggtatccagttgggagaatttgccaccccaatcttggagcgggcttcagctatgaaagaatctctcaatcttcaatctccagccaaaaatttagataaagttacgacagaatcttcttatgcaatgcctagcatcaaggatatttcacctggtgagttggcggaagccttacgccgaaatattgtgcaaccaatcgttgtaggtactggaacaaagattaaagagacttctgtagaagaagggaccaatcttgcaccaaaccaacaagttctccttttatcggataaggtagaagaaattccagacatgtatggctggaaaaaagagactgccgagacctttgctaaatggttggatattgaactggaatttgaaggttcaggttccgtcgttc

SEQ ID NO: 1041 - DNA, 1696 bp, Streptococcus pneumoniae strain StrR-08
gtctatcaaaaaagaattggaaactgcagaggtcaaggggattgattttacaaccagtcccaatcgtagttatccaaacggacaatttgcttctagttttatcggactagctcagctccatgaaaatgaagatggcagcaagagcttactgggaacctctggaatggagagttccttgaacagtattcttgcagggacagacggtattattacctatgaaaaagaccgtgtaggaaatatcgtaccaggtacagaactggtatcgcaacaaactgtggatggcaaggatgtttatacaacattgtctagtccgctacaatctttcatggaaactcagatggatgcctttctagaaaaagtaaaaggtaagtatatgaccgcgaccttggtcagtgcaaagaccggtgaaatcctcgctaccacccaacgacctacctttaatgcagatactaaagaaggaatcactgaggactttgtttggcgtgatattctttatcaaagtaactatgaaccaggatcagccatgaaggttatgacgttagcttcttctattgataataataccttcccaagtggagaatacttcaatagcagtgaattcaaaatagcggatgcgacgactcgagattgggatgttaatgatggtttgactactggtgggatgatgactttcttacaaggtttcgctcactccagtaatgttggaatgagtctacttgaacaaaaaatgggagatgctacttggttggattatctaaaacgctttaaatttggggttccaactcgctttggcttgacagatgaatacgctggtcaacttccagctgataatattgttagtattgctcaaagctcatttgggcaaggaatttcagtgacacaaacacaaatgcttcgtgcctttacagctattgctaatgatggagttatgctggagccaaaatttataagtgctatttatgatactaacaatcagtctgtacgtaagtcacaaaaagaaatagtaggaaatcctgtttccaaagaggcagcaagcacaactcgaaatcacatgatcttagttgggacggaccctctatatggaactatgtataatcactacacaggaaagccaattataacagttcctggacaaaatgtagcagttaaatccggtacggctcaaatcgctgatgagaaaaatggaggatacttggttggttctaccaattatattttctcagttgtgactatgaatcctgctgaaaatcctgattttatcttgtatgtaacggttcaacagcctgagcattattcaggtatccagttgggagaatttgccaccccaatcttggagcgggcttcagctatgaaagaatctctcaatcttcaatctccagccaaaaatttagataaagttacgacagaatcttcttatgcaatgcctagcatcaaggatatttcacctggtgagttggcggaagccttacgccgaaatattgtgcaaccaatcgttgtaggtactggaacaaagattaaagagacttctgtagaagaagggaccaatcttgcaccaaaccaacaagttctccttttatcggataaggtagaagaaattccagacatgtatggctggaaaaaagagactgccgagacctttgctaaatggttggatattgaactggaatttgaaggttcaggttccgttgttcagaag

SEQ ID NO: 1042 - DNA, 1689 bp, Streptococcus pneumoniae strain StrR-09
aaaaaagagttggaaactgcagaggtcaaggggattgattttacaaccagtcccaatcgtagttacccaaacggacaatttgcttctagttttatcggactagctcagctccatgaaaatgaagatggcagcaagagcttgctgggaacctctggaatggagagttccttgaacagtattcttgcagggacagacggcattattacctatgaaaaggatcgtctgggaaatattgtccccggaacggaacaagtttcccaacaaactgtagatggcaaggatgtttatacgactatttccagcacccttcagtccttcatggaaactcagatggatgcctttctagaaaaagtaaaaggtaagtatatgaccgcgaccttggtcagtgcaaagaccggtgaaatcctcgctaccacccaacgacctacctttaatgcagatactaaagaaggaatcactgaggactttgtttggcgtgatattctttatcaaagtaactatgaaccaggatcagccatgaaggttatgacgttagcttcttctattgataataataccttcccaagtggagaatacttcaatagcagtgaattcaaaatagcggatgcgacgactcgagattgggatgttaatgatggtttgactactggtgggatgatgactttcttacaaggtttcgctcactccagtaatgttggaatgagtctacttgaacaaaaaatgggagatgctacttggttggattatctaaaacgctttaaatttggggttccaactcgctttggcttgacagatgaatacgctggtcaacttccagctgataatattgttagtattgctcaaagctcatttgggcaaggaatttcagtgacacaaacacaaatgcttcgtgcctttacagctattgctaatgatggagttatgctggagccaaaatttataagtgctatttatgatactaacaatcagtctgtacgtaagtcacaaaaagaaatagtaggaaatcctgtttccaaagaggcagcaagcacaactcgaaatcacatgatcttagttgggacggaccctctatatggaactatgtataatcactacacaggaaagccaattataacagttcctggacaaaatgtagcagttaaatccggtacggctcaaatcgctgatgagaaaaatggaggatacttggttggttctaccaattatattttctcagttgtgactatgaatcctgctgaaaatcctgattttatcttgtatgtaacggttcaacagcctgagcattattcaggtatccagttgggagaatttgccaccccaatcttggagcgggcttcagctatgaaagactctctcaatcttcaaacaacagctaaagctttggagcaagtaagtcaacaaagtccttatcctatgcctagtgtcaaggatatttcacctggtgatttagcagaagaattgcgtcgcaatcttgtacaacccatcgttgtgggaacaggaacgaagattaaaaacagttctgctgaagaagggaagaatcttgccccgaatcagcaagtccttatcttatctgataaagtagaggaagttccagatatgtatggttggacaaaggagactgctgagacccttgctaagtggctcaatatagaacttgaatttcaaggttcgggttctactgtgcagaag

SEQ ID NO: 1043 - DNA, 1690 bp, Streptococcus pneumoniae strain StrR-10
caaaaaagagttggaaactgcagaggtcaaggggattgattttacaaccagtcctaatcgtagttacccaaacggacaatttgcttctagttttatcggtctagctcaactccatgaaaatgaagatggaagcaagagtttgctgggaacttctggaatggagagttccttgaacagtattcttgcagggaaagacggtattattacttatgaaaaggatcgtctgggtaatattgtccctggaacagaacaagtttcccaacaaacggtagatggcaaggatgtttatacaacattgtctagtccgctccaatctttcatggaaactcagatggatgcctttctagaaaaagtaaaaggtaagtatatgaccgcgaccttggtcagtgcaaagaccggtgaaatcctcgctaccacccaacgacctacctttaatgcagatactaaagaaggaatcactgaggactttgtttggcgtgatattctttatcaaagtaactatgaaccaggatcagccatgaaggttatgacgttagcttcttctattgataataataccttcccaagtggagaatacttcaatagcagtgaattcaaaatagcggatgcgacgactcgagattgggatgttaatgatggtttgactactggtgggatgatgactttcttacaaggtttcgctcactccagtaatgttggaatgagtctacttgaacaaaaaatgggagatgctacttggttggattatctaaaacgctttaaatttggggttccaactcgctttggcttgacagatgaatacgctggtcaacttccagctgataatattgttagtattgctcaaagctcatttgggcaaggaatttcagtgacacaaacacaaatgcttcgtgcctttacagctattgctaatgatggagttatgctggagccaaaatttataagtgctatttatgatactaacaatcagtctgtacgtaagtcacaaaaagaaatagtaggaaatcctgtttccaaagaggcagcaagcacaactcgaaatcacatgatcttagttgggacggaccctctatatggaactatgtataatcactacacaggaaagccaattataacagttcctggacaaaatgtagcagttaaatccggtacggctcaaatcgctgatgagaaaaatggaggatacttggttggttctaccaattatattttctcagttgtgactatgaatcctgctgaaaatcctgattttatcttgtatgtaacggttcaacagcctgagcattattcaggtatccagttgggagaatttgccaccccaatcttggagcgggcttcagctatgaaagaatctctcaatcttcaatctccagccaaaaatttagataaagttacgacagaatcttcttatgcaatgcctagcatcaaggatatttcacctggtgagttggcggaagccttacgccgaaatattgtgcaaccaatcgttgtaggtactggaacaaagattaaagagacttctgtagaagaagggaccaatcttgcaccaaaccaacaagttctccttttatcggataaggtagaagaaattccagacatgtatggctggaaaaaagagactgccgagacctttgctaaatggttggatattgaactggaatttgaaggttcaggttccgttgttcagaag

SEQ ID NO: 1044 - DNA, 1668 bp, Streptococcus pneumoniae strain StrR-11
agttggaaactgcagaggtcaaggggattgattttacaaccagtcctaatcgtagttacccaaacggacaatttgcttctagttttatcggactagctcagctccatgaaaatgaagatggcagcaagagcttgctgggaacctctgggatggagagttctttaaatagaattcttgcagggacagacggcattattacctatgaaaaggatcgtctgggaaatattgtccccggaacggaacaagtttcccaacaaacggtagatggcaaggatgtttatacgactatttccagcacccttcagtccttcatggagacccagatgaatgcctttcaagaaaaagtaaaaggcaagtatatgacggctaccttggtcagtgctaaaacaggggaaattcttgcaacaacgcaacggccgaccttcgatgctgatactaaggaaggacttaccaaggactttgtttggcgtgatatcctctatcaaagtaactatgagccagggtcaaccatgaaggtcatgacgcttgctgctgctattgataataacactttcccaggaggagaagttttcaatagtagtgaattaaaaatagcggatgcgacaattcgagattgggatgttaatgatggtttgacgactggtgggatgatgactttcttacaaggtttcgctcactccagtaatgttggaatgagtctacttgaacaaaaaatgggagatgctacttggttggattatctaaaccgctttaagtttggggtgccgacgcgttttggtctgactgatgagtattcaggtcaattgcctgcagataatattgttaatattgccatgagtgcatttggtcaggggatttcagtgacccagacgcaaatgattcgtgcctttacagctattgctaatgatggtgttatgctggagcctaaatttattagtgccatttatgatccaaatgatcaaactgctcggaaatctcaaaaagaaattgtgggaaatcctgtttctaaagatgcagctagtctaactcggactaacatgattttggtagggacggatccggtttatggaaccatgtataaccacagcacaggtaagccaactgtaactgttcctgggcaaaatgtagccctcaagtctggtacggctcagattgctgacgagaaaaatggtggttatctagtcgggttaaccaactatattttctcggctgtatcgatgaatccggctgaaaatcctgattttatcttgtatgtaacggtacagcaacctgaacattattcaggtatccagttgggagaatttgccaccccaatcttggagcgggcttcagctatgaaagaatctctcaatcttcaatctccagccaagaatttagataaagttacgacagaatcttcttatgcaatgcctagcatcaaggatatttcacctggtgagttggcggaagccttacgccgaaatattgtgcaaccaatcgttgtaggtactggaacaaagattaaagagacttctgtagaagaagggaccaatcttgcaccaaaccaacaagttctccttttatcggataaggtagaagaaattccagacatgtatggctggaaaaaagagactgctgaaacctttgctaaatggttggatattgagctggaatttgaagggtcaggtt

SEQ ID NO: 1045 - DNA, 1680 bp, Streptococcus pneumoniae strain StrR-12
ttggaaactgcagaggtcaaggggattgattttacaaccagtcccaatcgtagttacccaaatggacaatttgcttctagttttatcggtctagctcagctccatgaaaatgaagatggaagcaagagtttgctgggaacctctggaatggagagttccttgaacagtattcttgcagggacagacggcattattacctatgaaaaggatcgtctgggcaatattgtacccggaacagaacaagtttcccaacaaacggtggatggcaaggatgtttacacaaccatttccagccccctccagtccttcatggaaactcagatggatgcctttctagaaaaagtaaaaggtaagtatatgaccgcgaccttggtcagtgcaaagaccggtgaaatcctcgctaccacccaacgacctacctttaatgcagatactaaagaaggaatcactgaggactttgtttggcgtgatattctttatcaaagtaactatgaaccaggatcagccatgaaggttatgacgttagcttcttctattgataataataccttcccaagtggagaatacttcaatagcagtgaattcaaaatagcggatgcgacgactcgagattgggatgttaatgatggtttgactactggtgggatgatgactttcttacaaggtttcgctcactccagtaatgttggaatgagtctacttgaacaaaaaatgggagatgctacttggttggattatctaaaacgctttaaatttggggttccaactcgctttggcttgacagatgaatacgctggtcaacttccagctgataatattgttagtattgctcaaagctcatttgggcaaggaatttcagtgacacaaacacaaatgcttcgtgcctttacagctattgctaatgatggagttatgctggagccaaaatttataagtgctatttatgatactaacaatcagtctgtacgtaagtcacaaaaagaaatagtaggaaatcctgtttccaaagaggcagcaagcacaactcgaaatcacatgatcttagttgggacggaccctctatatggaactatgtataatcactacacaggaaagccaattataacagttcctggacaaaatgtagcagttaaatccggtgcggctcaaatcgctgatgagaaaaatggaggatacttggttggttctaccaattatattttctcagttgtgactatgaatcctgctgaaaatcctgattttatcttgtatgtaacggttcaacagcctgagcattattcaggtatccagttgggagaatttgccaccccaatcttggagcgggcttcagctatgaaagaatctctcaatcttcaatctccagccaaaaatttagataaagttacgacagaatcttcttatgcaatgcctagcatcaaggatatttcacctggtgagttggcggaagccttacgccgaaatattgtgcaaccaatcgttgtaggtactggaacaaagattaaagagacttctgtagaagaagggaccaatcttgcaccaaaccaacaagttctccttttatcggataaggtagaagaaattccagacatgtatggctggaaaaaagagactgccgagacctttgctaaatggttggatattgaactggaatttgaaggttcaggttccgttgttcagaag

SEQ ID NO: 1046 - DNA, 1689 bp, Streptococcus pneumoniae strain StrR-13
aaaaaagagttggaaactgcagaggtcaaggggattgattttacaaccagtcctaatcgtagttacccaaacggacaatttgcttctagttttatcggtctagctcaactccatgaaaatgaagatggaagcaagagtttgctgggaacttctggaatggagagttccttgaacagtattcttgcagggaaagacggtattattacttatgaaaaggatcgtctgggtaatattgtccctggaacagaacaagtttcccaacaaacggtagatggcaaggatgtttatacaacattgtctagtccgctccaatctttcatggaaactcagatggatgcctttctagaaaaagtaaaaggtaagtatatgaccgcgaccttggtcagtgcaaagaccggtgaaatcctcgctaccacccaacgacctacctttaatgcagatactaaagaaggaatcactgaggactttgtttggcgtgatattctttatcaaagtaactatgaaccaggatcagccatgaaggttatgacgttagcttcttctattgataataataccttcccaagtggagaatacttcaatagcagtgaattcaaaatagcggatgcgacgactcgagattgggatgttaatgatggtttgactactggtgggatgatgactttcttacaaggtttcgctcactccagtaatgttggaatgagtctacttgaacaaaaaatgggagatgctacttggttggattatctaaaacgctttaaatttggggttccaactcgctttggcttgacagatgaatacgctggtcaacttccagctgataatattgttagtattgctcaaagctcatttgggcaaggaatttcagtgacacaaacacaaatgcttcgtgcctttacagctattgctaatgatggagttatgctggagccaaaatttataagtgctatttatgatactaacaatcagtctgtacgtaagtcacaaaaagaaatagtaggaaatcctgtttccaaagaggcagcaagcacaactcgaaatcacatgatcttagttgggacggaccctctatatggaactatgtataatcactacacaggaaagccaattataacagttcctggacaaaatgtagcagttaaatccggtacggctcaaatcgctgatgagaaaaatggaggatacttggttggttctaccaattatattttctcagttgtgactatgaatcctgctgaaaatcctgattttatcttgtatgtaacggttcaacagcctgagcattattcaggtatccagttgggagaatttgccaccccaatcttggagcgggcttcagctatgaaagaatctctcaatcttcaatctccagccaaaaatttagataaagttacgacagaatcttcttatgcaatgcctagcatcaaggatatttcacctggtgagttggcggaagccttacgccgaaatattgtgcaaccaatcgttgtaggtactggaacaaagattaaagagacttctgtagaagaagggaccaatcttgcaccaaaccaacaagttctccttttatcggataaggtagaagaaattccagacatgtatggctggaaaaaagagactgccgagacctttgctaaatggttggatattgaactggaatttgaaggttcaggttccgttgttcagaag

SEQ ID NO: 1047 - DNA, 1690 bp, Streptococcus pneumoniae strain StrR-14
caaaaaagaattggaagctgcagaggtcaaggggattgattttacaaccagtcccaaccgtagttacccaaacggacaatttgcttctagttttatcggactagctcagctccatgaaaatgaagatggcagcaagagcttgctgggaacttctggaatggagagttccttgaacagtattcttgcagggacagacggcattattacctatgaaaaggatcgtctgggtaatattgtacccggaacagaacaagtttcccaacaaacggtagatggcaaggatgtttacacaaccatttccagccccctccagtcctttatggaaacccagatggatgcttttcaagagaaggtaaaaggaaagtacacgacagcgactttggtcagtgctaaaacaggggaaattctggcaacaacgcaacgaccgacctttgatgcagatacaaaagaaggcattacagaggactttgtttggcgtgatatcctttaccaaagtaactatgagccaggttcccctatgaaagtgatgatgttggctgctgctattgataataatacctttccagggggagaagtcttcaatagtagtgagttaaaaattgcagatgtcacgattcgagattgggacgtcaatgaaggattgactggtggcagaatgatgaccttttctcaagggttcgctcactcaagtaacgttgggatgacgcttcttgagcaaaagatgggagatgctacatggcttgattatctaaatcgctttaaatttggtgttccgactcgttttggcttgacggatgaatatgcaggccaacttccagctgacaatatcgtaaatattgctcagagttcatttggacaagggatttcagcgacccagacgcaaatgattcgtgccttcacggctattgccaacgatggagtcatgttagaacctaaatttatcagtgccatttatgatccaaatgatcaaactgctcggaaatcacaaaaagaagttgtgggaaatcctgtgtctaaagatgcagcgagcttgacgcgaacgcatatggttttagtcggtaccgatccagtatatggaactatgtataatcataagacagggaaaccaactgtaactgttcctgggcaaaatgtagccctcaagtctggtacggctcagattgccgatgagaaaaatggaggttacttagttggtacgaccaattacattttttcggctgtatcgatgaaccctgctgaaaatcctgattttattctctatgtgacggttcaacagcctgagcattattcaggtattcagttgggggaatttgccaatcctatcttggaaagggcagtggctatgaaagattcccttaacctccaatctaccgctaaaacgttaaatcaggtaaccaatcaaagcgcttatgccatgcctagcatcaaggacatttcacctggcgatttggcggaagccttacgtcgcaatattgtgcaaccaatcgttgtaggaacaggaacaaaaattaaagaatcatctgtagaagaagggacggatcttgcacctaaccagcaagttcttctcttatctgataaagcagaggaagttccagatatgtatggttggacaaaagagactgctgagacctttgctaagtggctcaatatagaacttgaatttgaaggttcgggctctactgtgcagaag

SEQ ID NO: 1048 - DNA, 1682 bp, Streptococcus pneumoniae strain StrR-15
aaaagagttggaaactgcagaggtcaaggggattgattttacaaccagtcccaatcgtagttacccaaacggacaatttgcttctagctttattggcttagcccaacttcatgaaaatgaggatggtagtaagagtttgttagggacttctggtttggagagttctttaaataccattcttgctgggacagacggtattattacctatgaaaaagaccgtgtaggaaatatcgtaccaggtacagaactggtatcgcaacaaactgtggatggcaaggatgtttatacaacattgtctagtccgctacaatctttcatggaaactcagatggatgcctttctagaaaaagtaaaaggtaagtatatgaccgcgaccttggtcagtgcaaagaccggtgaaatcctcgctaccacccaacgacctacctttaatgcagatactaaagaaggaatcactgaggactttgtttggcgtgatattctttatcaaagtaactatgaaccaggatcagccatgaaggttatgacgttagcttcttctattgataataataccttcccaagtggagaatacttcaatagcagtgaattcaaaatagcggatgcgacgactcgagattgggatgttaatgaaggtttgactactggtgggatgatgactttcttacaaggtttcgctcactccagtaatgttggaatgagtctacttgaacaaaaaatgggagatgctacttggttggattatctaaaacgctttaaatttggggttccaactcgctttggcttgacagatgaatacgctggtcaacttccagctgataatattgttagtattgctcaaagctcatttgggcaaggaatttcagtgacacaaacacaaatgcttcgtgcctttacagctattgctaatgatggagttatgctggagccaaaatttataagtgctatttatgatactaacaatcagtctgtacgtaagtcacaaaaagaaatagtaggaaatcctgtttccaaagaggcagcaagcacaactcgaaatcacatgatcttagttgggacggaccctctatatggaactatgtataatcactacacaggaaagccaattataacagttcctggacaaaatgtagcagttaaatccggtacggctcaaatcgctgatgagaaaaatggaggatacttggttggttctaccaattatattttctcagttgtgactatgaatcctgctgaaaatcctgattttatcttgtatgtaacggttcaacagcctgagcattattcaggtatccagttgggagaatttgccaccccaatcttggagcgggcttcagctatgaaagaatctctcaatcttcaatctccagccaaaaatttagataaagttacgacagaatcttcttatgcaatgcctagcatcaaggatatttcacctggtgagttggcggaagccttacgccgaaatattgtgcaaccaatcgttgtaggtactggaacaaagattaaagagacttctgtagaagaagggaccaatcttgcaccaaaccaacaagttctccttttatcggataaggtagaagaaattccagacatgtatggctggaaaaaagagactgctgaaacctttgctaaatggttggatattgagttggaatttgaaggttcaggttccgtcgttc

SEQ ID NO: 1049 - DNA, 1241 bp, Enterococcus faecium strain R690
gcagcgttgcgtgataccgttgaaaaaaccattaaaaactgtttggattttgaaaggagacaggagcatgaatagaataaaagttgcaatactgtttgggggttgctcagaggagcatgacgtatcggtaaaatctgcaatagagatagccgctaacattaataaagaaaaatacgagccgttatacattggaattacgaaatctggtgtatggaaaatgtgcgaaaaaccttgcgcggaatgggaaaacgacaattgctattcagctgtactctcgccggataaaaaaatgcacggattacttgttaaaaagaaccatgaatatgaaatcaaccatgttgatgtagcattttcagctttgcatggcaagtcaggtgaagatggatccatacaaggtctgtttgaattgtccggtatcccttttgtaggctgcgatattcaaagctcagcaatttgtatggacaaatcgttgacatacatcgttgcgaaaaatgctgggatagctactcccgccttttgggttattaataaagatgataggccggtggcagctacgtttacctatcctgtttttgttaagccggcgcgttcaggctcatccttcggtgtgaaaaaagtcaatagcgcggacgaattggactacgcaattgaatcggcaagacaatatgacagcaaaatcttaattgagcaggctgtttcgggctgtgaggtcggttgtgcggtattgggaaacagtgccgcgttagctgttggcgaggtggaccaaatcaggctgcagtacggaatctttcgtattcatcaggaagtcgagccggaaaaaggctctgaaaacgcagttataaccgttcccgcagacctttcagcagaggagcgaggacggatacaggaaacggcaaaaaaaatatataaagcgctcggctgtagaggtctagcccgtgtggatatgtttttacaagataacggccgcattgtactgaacgaagtcaatactctgcccggtttcacgtcatacagtcgttatccccgtatgatggccgctgcaggtattgcacttcccgaactgattgaccgcttgatcgtattagcgttaaaggggtgataagcatggaaataggatttacttttttagatgaaatagtacacggtgttcgttgggacgctaaatatgccacttgggataatttcaccggaaaaccggttgacggttatgaagtaaatcgcattgtagggacatacgaatt

SEQ ID NO: 1050 - DNA, 1249 bp, Enterococcus gallinarum strain R691
tcacaccgcatacggcctattataccgagcaagcgttgcgtgataccgttgaaaaaaccattaaaaactgtttggattttgaaaggagacaggagcatgaatagaataaaagttgcaatactgtttgggggttgctcagaggagcatgacgtatcggtaaaatctgcaatagagatagccgctaacattaataaagaaaaatacgagccgttatacattggaattacgaaatctggtgtatggaaaatgtgcgaaaaaccttgcgcggaatgggaaaacgacaattgctattcagctgtactctcgccggataaaaaaatgcacggattacttgttaaaaagaaccatgaatatgaaatcaaccatgttgatgtagcattttcagctttgcatggcaagtcaggtgaagatggatccatacaaggtctgtttgaattgtccggtatcccttttgtaggctgcgatattcaaagctcagcaatttgtatggacaaatcgttgacatacatcgttgcgaaaaatgctgggatagctactcccgccttttgggttattaataaagatgataggccggtggcagctacgtttacctatcctgtttttgttaagccggcgcgttcaggctcatccttcggtgtgaaaaaagtcaatagcgcggacgaattggactacgcaattgaatcggcaagacaatatgacagcaaaatcttaattgagcaggctgtttcgggctgtgaggtcggttgtgcggtattgggaaacagtgccgcgttagctgttggcgaggtggaccaaatcaggctgcagtacggaatctttcgtattcatcaggaagtcgagccggaaaaaggctctgaaaacgcagttataaccgttcccgcagacctttcagcagaggagcgaggacggatacaggaaacggcaaaaaaaatatataaagcgctcggctgtagaggtctagcccgtgtggatatgtttttacaagataacggccgcattgtactgaacgaagtcaatactctgcccggtttcacgtcatacagtcgttatccccgtatgatggccgctgcaggtattgcacttcccgaactgattgaccgcttgatcgtattagcgttaaaggggtgataagcatggaaataggatttacttttttagatgaaatagtacacggtgttcgttgggacgctaaatatgccacttgggataatttcaccggaaaaccggttgacggttatgaagtaaatcg

SEQ ID NO: 1051 - DNA, 1272 bp, Enterococcus faecium strain R481
tataccgagcaagcgttgcgtgataccgttgaaaaaaccattaaaaactgtttggattttgaaaggagacaggagcatgaatagaataaaagttgcaatactgtttgggggttgctcagaggagcatgacgtatcggtaaaatctgcaatagagatagccgctaacattaataaagaaaaatacgagccgttatacattggaattacgaaatctggtgtatggaaaatgtgcgaaaaaccttgcgcggaatgggaaaacgacaattgctattcagctgtactctcgccggataaaaaaatgcacggattacttgttaaaaagaaccatgaatatgaaatcaaccatgttgatgtagcattttcagctttgcatggcaagtcaggtgaagatggatccatacaaggtctgtttgaattgtccggtatcccttttgtaggctgcgatattcaaagctcagcaatttgtatggacaaatcgttgacatacatcgttgcgaaaaatgctgggatagctactcccgccttttgggttattaataaagatgataggccggtggcagctacgtttacctatcctgtttttgttaagccggcgcgttcaggctcatccttcggtgtgaaaaaagtcaatagcgcggacgaattggactacgcaattgaatcggcaagacaatatgacagcaaaatcttaattgagcaggctgtttcgggctgtgaggtcggttgtgcggtattgggaaacagtgccgcgttagttgttggcgaggtggaccaaatcaggctgcagtacggaatctttcgtattcatcaggaagtcgagccggaaaaaggctctgaaaacgcagttataaccgttcccgcagacctttcagcagaggagcgaggacggatacaggaaacggcaaaaaaaatatataaagcgctcggctgtagaggtctagcccgtgtggatatgtttttacaagataacggccgcattgtactgaacgaagtcaatactctgcccggtttcacgtcatacagtcgttatccccgtatgatggccgctgcaggtattgcacttcccgaactgattgaccgcttgatcgtattagcgttaaaggggtgataagcatggaaataggatttacttttttagatgaaatagtacacggtgttcgttgggacgctaaatatgccacttgggataatttcaccggaaaaccggttgacggttatgaagtaaatcgcattgtagggacatacgaattggcttgaatcgctttttgaagg

SEQ ID NO: 1052 - DNA, 1237 bp, Enterococcus faecium strain R492
tcccccggcatacggcctattataccgagcaagcgttgcgtgataccgttgaaaaaaccattaaaaactgtttggattttgaaaggagacaggagcatgaatagaataaaagttgcaatactgtttgggggttgctcagaggagcatgacgtatcggtaaaatctgcaatagagatagccgctaacattaataaagaaaaatacgagccgttatacattggaattacgaaatctggtgtatggaaaatgtgcgaaaaaccttgcgcggaatgggaaaacgacaattgctattcagctgtactctcgccggataaaaaaatgcacggattacttgttaaaaagaaccatgaatatgaaatcaaccatgttgatgtagcattttcagctttgcatggcaagtcaggtgaagatggatccatacaaggtctgtttgaattgtccggtatcccttttgtaggctgcgatattcaaagctcagcaatttgtatggacaaatcgttgacatacatcgttgcgaaaaatgctgggatagctactcccgccttttgggttattaataaagatgataggccggtggcagctacgtttacctatcctgtttttgttaagccggcgcgttcaggctcatccttcggtgtgaaaaaagtcaatagcgcggacgaattggactacgcaattgaatcggcaagacaatatgacagcaaaatcttaattgagcaggctgtttcgggctgtgaggtcggttgtgcggtattgggaaacagtgccgcgttagctgttggcgaggtggaccaaatcaggctgcagtacggaatctttcgtattcatcaggaagtcgagccggaaaaaggctctgaaaacgcagttataaccgttcccgcagacctttcagcagaggagcgaggacggatacaggaaacggcaaaaaaaatatataaagcgctcggctgtagaggtctagcccgtgtggatatgtttttacaagataacggccgcattgtactgaacgaagtcaatactctgcccggtttcacgtcatacagtcgttatccccgtatgatggccgctgcaggtattgcacttcccgaactgattgaccgcttgatcgtattagcgttaaaggggtgataagcatggaaataggatttacttttttagatgaaatagtacacggtgttcgttgggacgctaaatatgccacttgggataatttcaccggaaaaccggttgacggtta

SEQ ID NO: 1053 - DNA, 1263 bp, Enterococcus faecium strain R581
catacggcctattataccgagcaagcgttgcgtgataccgttgaaaaaaccattaaaaactgtttggattttgaaaggagacaggagcatgaatagaataaaagttgcaatactgtttgggggttgctcagaggagcatgacgtatcggtaaaatctgcaatagagatagccgctaacattaataaagaaaaatacgagccgttatacattggaattacgaaatctggtgtatggaaaatgtgcgaaaaaccttgcgcggaatgggaaaacgacaattgctattcagctgtactctcgccggataaaaaaatgcacggattacttgttaaaaagaaccatgaatatgaaatcaaccatgttgatgtagcattttcagctttgcatggcaagtcaggtgaagatggatccatacaaggtctgtttgaattgtccggtatcccttttgtaggctgcgatattcaaagctcagcaatttgtatggacaaatcgttgacatacatcgttgcgaaaaatgctgggatagctactcccgccttttgggttattaataaagatgataggccggtggcagctacgtttacctatcctgtttttgttaagccggcgcgttcaggctcatccttcggtgtgaaaaaagtcaatagcgcggacgaattggactacgcaattgaatcggcaagacaatatgacagcaaaatcttaattgagcaggctgtttcgggctgtgaggtcggttgtgcggtattgggaaacagtgccgcgttagctgttggcgaggtggaccaaatcaggctgcagtacggaatctttcgtattcatcaggaagtcgagccggaaaaaggctctgaaaacgcagttataaccgttcccgcagacctttcagcagaggagcgaggacggatacaggaaacggcaaaaaaaatatataaagcgctcggctgtagaggtctagcccgtgtggatatgtttttacaagataacggccgcattgtactgaacgaagtcaatactctgcccggtttcacgtcatacagtcgttatccccgtatgatggccgctgcaggtattgcacttcccgaactgattgaccgcttgatcgtattagcgttaaaggggtgataagcatggaaataggatttacttttttagatgaaatagtacacggtgttcgttgggacgctaaatatgccacttgggataatttcaccggaaaaccggttgacgggtatgaaagtaaatcgcattgtagggacattcgaatt

SEQ ID NO: 1054 - DNA, 1232 bp, Enterococcus faecalis R610
  misc_feature (1)...(1232): n=a,t,c or g
cggcctattatnccgagcaagcgttgcgtgataccgttgaaaaaaccattaaaaactgtttggattttgaaaggagacaggagcatgaatagaataaaagttgcaatactgtttgggggttgctcagaggagcatgacgtatcggtaaaatctgcaatagagatagccgctaacattaataaagaaaaatacgagccgttatacattggaattacgaaatctggtgtatggaaaatgtgcgaaaaaccttgcgcggaatgggaaaacgacaattgctattcagctgtactctcgccggataaaaaaatgcacggattacttgttaaaaagaaccatgaatatgaaatcaaccatgttgatgtagcattttcagctttgcatggcaagtcaggtgaagatggatccatacaaggtctgtttgaattgtccggtatcccttttgtaggctgcgatattcaaagctcagcaatttgtatggacaaatcgttgacatacatcgttgcgaaaaatgctgggatagctactcccgccttttgggttattaataaagatgataggccggtggcagctacgtttacctatcctgtttttgttaagccggcgcgttcaggctcatccttcggtgtgaaaaaagtcaatagcgcggacgaattggactacgcaattgaatcggcaagacaatatgacagcaaaatcttaattgagcaggctgtttcgggctgtgaggtcggttgtgcggtattgggaaacagtgccgcgttagttgttggcgaggtggaccaaatcaggctgcagtacggaatctttcgtattcatcaggaagtcgagccggaaaaaggctctgaaaacgcagttataaccgttcccgcagacctttcagcagaggagcgaggacggatacaggaaacggcaaaaaaaatatataaagcgctcggctgtagaggtctagcccgtgtggatatgtttttacaagataacggccgcattgtactgaacgaagtcaatactctgcccggtttcacgtcatacagtcgttatccccgtatgatggccgctgcaggtattgcacttcccgaactgattgaccgcttgatcgtattagcgttaaaggggtgataagcatggaaataggatttacttttttagatgaaatagtacacggtgttcgttgggacgctaaatatgccacttgggataatttcaccggaaaaccggttgacggttataagtaa

SEQ ID NO: 1055 - DNA, 1218 bp, Enterococcus gallinarum strain R684
taccgagcaagcgttgcgtgataccgttgaaaaaaccattaaaaactgtttggattttgaaaggagacaggagcatgaatagaataaaagttgcaatactgtttgggggttgctcagaggagcatgacgtatcggtaaaatctgcaatagagatagccgctaacattaataaagaaaaatacgagccgttatacattggaattacgaaatctggtgtatggaaaatgtgcgaaaaaccttgcgcggaatgggaaaacgacaattgctattcagctgtactctcgccggataaaaaaatgcacggattacttgttaaaaagaaccatgaatatgaaatcaaccatgttgatgtagcattttcagctttgcatggcaagtcaggtgaagatggatccatacaaggtctgtttgaattgtccggtatcccttttgtaggctgcgatattcaaagctcagcaatttgtatggacaaatcgttgacatacatcgttgcgaaaaatgctgggatagctactcccgccttttgggttattaataaagatgataggccggtggcagctacgtttacctatcctgtttttgttaagccggcgcgttcaggctcatccttcggtgtgaaaaaagtcaatagcgcggacgaattggactacgcaattgaatcggcaagacaatatgacagcaaaatcttaattgagcaggctgtttcgggctgtgaggtcggttgtgcggtattgggaaacagtgccgcgttagctgttggcgaggtggaccaaatcaggctgcagtacggaatctttcgtattcatcaggaagtcgagccggaaaaaggctctgaaaacgcagttataaccgttcccgcagacctttcagcagaggagcgaggacggatacaggaaacggcaaaaaaaatatataaagcgctcggctgtagaggtctagcccgtgtggatatgtttttacaagataacggccgcattgtactgaacgaagtcaatactctgcccggtttcacgtcatacagtcgttatccccgtatgatggccgctgcaggtattgcacttcccgaactgattgaccgcttgatcgtattagcgttaaaggggtgataagcatggaaataggatttacttttttagatgaaatagtacacggtgttcgttgggacgctaaatatgccacttgggataatttcaccggaaaaccggttgacggttagaa

SEQ ID NO: 1056 - DNA, 1265 bp, Enterococcus faecium strain R688
aatcacaccgcatacggcctattataccgagcaagcgttgcgtgataccgttgaaaaaaccattaaaaactgtttggattttgaaaggagacaggagcatgaatagaataaaagttgcaatactgtttgggggttgctcagaggagcatgacgtatcggtaaaatctgcaatagagatagccgctaacattaataaagaaaaatacgagccgttatacattggaattacgaaatctggtgtatggaaaatgtgcgaaaaaccttgcgcggaatgggaaaacgacaattgctattcagctgtactctcgccggataaaaaaatgcacggattacttgttaaaaagaaccatgaatatgaaatcaaccatgttgatgtagcattttcagctttgcatggcaagtcaggtgaagatggatccatacaaggtctgtttgaattgtccggtatcccttttgtaggctgcgatattcaaagctcagcaatttgtatggacaaatcgttgacatacatcgttgcgaaaaatgctgggatagctactcccgccttttgggttattaataaagatgataggccggtggcagctacgtttacctatcctgtttttgttaagccggcgcgttcaggctcatccttcggtgtgaaaaaagtcaatagcgcggacgaattggactacgcaattgaatcggcaagacaatatgacagcaaaatcttaattgagcaggctgtttcgggctgtgaggtcggttgtgcggtattgggaaacagtgccgcgttagctgttggcgaggtggaccaaatcaggctgcagtacggaatctttcgtattcatcaggaagtcgagccggaaaaaggctctgaaaacgcagttataaccgttcccgcagacctttcagcagaggagcgaggacggatacaggaaacggcaaaaaaaatatataaagcgctcggctgtagaggtctagcccgtgtggatatgtttttacaagataacggccgcattgtactgaacgaagtcaatactctgcccggtttcacgtcatacagtcgttatccccgtatgatggccgctgcaggtattgcacttcccgaactgattgaccgcttgatcgtattagcgttaaaggggtgataagcatggaaataggatttacttttttagatgaaatagtacacggtgttcgttgggacgctaaatatgccacttgggataatttcaccggaaaaccggttgacggttatgaagtaaatcgcattgtagggacat

SEQ ID NO: 1057 - DNA, 1269 bp, Enterococcus flavescens strain R689
tcacaccgcatacggcctattataccgagcaagcgttgcgtgataccgttgaaaaaaccattaaaaactgtttggattttgaaaggagacaggagcatgaatagaataaaagttgcaatactgtttgggggttgctcagaggagcatgacgtatcggtaaaatctgcaatagagatagccgctaacattaataaagaaaaatacgagccgttatacattggaattacgaaatctggtgtatggaaaatgtgcgaaaaaccttgcgcggaatgggaaaacgacaattgctattcagctgtactctcgccggataaaaaaatgcacggattacttgttaaaaagaaccatgaatatgaaatcaaccatgttgatgtagcattttcagctttgcatggcaagtcaggtgaagatggatccatacaaggtctgtttgaattgtccggtatcccttttgtaggctgcgatattcaaagctcagcaatttgtatggacaaatcgttgacatacatcgttgcgaaaaatgctgggatagctactcccgccttttgggttattaataaagatgataggccggtggcagctacgtttacctatcctgtttttgttaagccggcgcgttcaggctcatccttcggtgtgaaaaaagtcaatagcgcggacgaattggactacgcaattgaatcggcaagacaatatgacagcaaaatcttaattgagcaggctgtttcgggctgtgaggtcggttgtgcggtattgggaaacagtgccgcgttagctgttggcgaggtggaccaaatcaggctgcagtacggaatctttcgtattcatcaggaagtcgagccggaaaaaggctctgaaaacgcagttataaccgttcccgcagacctttcagcagaggagcgaggacggatacaggaaacggcaaaaaaaatatataaagcgctcggctgtagaggtctagcccgtgtggatatgtttttacaagataacggccgcattgtactgaacgaagtcaatactctgcccggtttcacgtcatacagtcgttatccccgtatgatggccgctgcaggtattgcacttcccgaactgattgaccgcttgatcgtattagcgttaaaggggtgataagcatggaaataggatttacttttttagatgaaatagtacacggtgttcgttgggacgctaaatatgccacttgggataatttcaccggaaaaccggttgacggttatgaagtaaatcgcattgtagggacatacgaat

SEQ ID NO: 1058 - DNA, 1169 bp, Enterococcus gallinarum strain R420
caaattttcttttcttttcctaggtacactgaatgtaaccttaaaagaaaaaaggaaaggaagaaaatgatgaaaaaaattgccgttttatttggagggaattctccagaatactcagtgtcactaacctcagcagcaagtgtgatccaagctattaacccgctgaaatatgaagtaatgaccattggcatcgcaccaacaatggattggtattggtatcaaggaaacctcgcgaatgttcgcaatgatacttggctagaagatcacaaaaactgtcaccagctgactttttctagccaaggatttatattaggagaaaaacgaatcgtccctgatgtcctctttccagtcttgcatgggaagtatggcgaggatggctgtatccaaggactgcttgaactaatgaacctgccttatgttggttgccatgtcgctgcctccgcattatgtatgaacaaatggctcttgcatcaacttgctgataccatgggaatcgctagtgctcccactttgcttttatcccgctatgaaaacgatcctgccacaatcgatcgttttattcaagaccatggattcccgatctttatcaagccgaatgaagccggttcttcaaaagggatcacaaaagtaactgacaaaacagcgctccaatctgcattaacgactgcttttgcttacggttctactgtgttgatccaaaaggcgatagcgggtattgaaattggctgcggcatcttaggaaatgagcaattgacgattggtgcttgtgatgcgatttctcttgtcgacggtttttttgattttgaagagaaataccaattaatcagcgccacgatcactgtcccagcaccattgcctctcgcgcttgaatcacagatcaaggagcaggcacagctgctttatcgaaacttgggattgacgggtctggctcgaatcgattttttcgtcaccaatcaaggagcgatttatttaaacgaaatcaacaccatgccgggatttactgggcactcccgctacccagctatgatggcggaagtcgggttatcctacgaaatattagtagagcaattgattgcactggcagaggaggacaaacgatgaacacattacaattgatcaataaaaaccatccattgaaaaaaaatcaagagcccccgcacttagtgcta

SEQ ID NO: 1059 - DNA, 1166 bp, Enterococcus gallinarum strain R631
caaattttcttttcttttcctaggtacactgaatgtaaccttaaaagaaaaaaggaaaggaagaaaatgatgaaaaaaattgccgttttatttggagggaattctccagaatactcagtgtcactagcctcagcagcaagtgtgatccaagctattgacccgctgaaatatgaagtaatgaccattggcatcgcaccaacaatggattggtattggtatcaaggaaacctcgcgaatgttcgcaatgatacttggctagaagatcacaaaaactgtcaccagctgactttttctagccaaggatttatattaggagaaaaacgaatcgtccctgatgtcctctttccagtcttgcatgggaagtatggcgaggatggctgtatccaaggactgcttgaactaatgaacctgccttatgttggttgccatgtcgctgcctccgcattatgtatgaacaaatggctcttgcatcaacttgctgataccatgggaatcgctagtgctcccactttgcttttatcccgctatgaaaacgatcctgccacaatcgatcgttttattcaagaccatggattcccgatctttatcaagccgaatgaagccggttcttcaaaagggatcacaaaagtaactgacaaaacagcgctccaatctgcattaacgactgcttttgcttacggttctactgtgttgatccaaaaggcgatagcgggtattgaaattggctgcggcatcttaggaaatgagcaattgacgattggtgcttgtgatgcgatttctcttgtcgacggtttttttgattttgaagagaaataccaattaatcagcgccacgatcactgtcccagcaccattgcctctcgcgcttgaatcacagatcaaggagcaggcacagctgctttatcgaaacttgggattgacgggtctggctcgaatcgattttttcgtcaccaatcaaggagcgatttatttaaacgaaatcaacaccatgccgggatttactgggcactcccgctacccagctatgatggcggaagtcgggttatcctacgaaatattagtagagcaattgattgcactggcagaggaggacaaacgatgaacacattacaattgatcaataaaaaccatccattgaaaaaaaatcaagagcccccgcacttagtg

SEQ ID NO: 1060 - DNA, 1028 bp, Enterococcus casseliflavus ATCC 25788
aacatgaaaaaaatcgccttatttttggaggcaattcaccggaatacaccgtttctttagcttcagcaactagcgcaatcgaagcactccaatcatctccctatgactacgacctctctttgatcgggatcgccccagatgctatggattggtacttgtatacaggagaactggaaaacatccgacaagacacgtggttgttggatacgaaacataaacagaaaatacagccgctattcgaaggaaacggcttttggctaagtgaagagcagcaaacgttggtacctgatgttttatttcccattatgcatggcaaatacggggaagatggcagtatccaaggattgtttgaattgatgaagctgccttatgtaggctgcggggtggcaggttctgccttatgtatgaacaaatggctgctgcatcaagctgcagcagccattggcgtacaaagtgctcctacgattctcttgacaaatcaagccaaccagcaagaacaaatcgaagcttttatccagacccatggcttcccagttttctttaagcctaatgaagcgggctcctcaaaagggatcactaaagtcacctgcgttgaagaaatcgcttctgccttaaaagaagcctttacttattgttccgcagtgctcctacaaaaaaatattgccggtgttgagatcggttgcggtattttgggcaacgactctttgactgtcggtgcttgtgacgccatttcattagtagacggctttttcgattttgaagaaaagtaccagctgatcagcgccaaaatcaccgtccctgcgccattgcctgaaacgattgaaaccaaggtcaaagaacaagctcagctgctctatcgtagtcttggtcttaaaggtcttgctcgcatcgacttttttgtcacggagcgaggagaactatacttgaatgaaatcaatactatgccgggctttacgagtcactcccgctatcctgccatgatggcagcggtcggcttatcctatcaagaactactacaaaaactgctt

SEQ ID NO: 1061 - DNA, 1030 bp, Enterococcus casseliflavus strain R689
aatatgaaaaaaatcgccttatttttggaggcaattcaccggagtacgccgtttctttagcctcagcaactagcgcaatcgaagcactccaatcatctcccgatgactatgacctctctttgatcgggatcgccccagatgctatggattggtatttgtatacaggagaactggaaaacatccgacaagacacgtggttgttggatacgaaacataaacagaaaatccagccgctttttgaaggaaacggcttttggctaagtgaagagcaacaaacgttggttcctgatgttttatttcccattatgcatggcaaatacggggaagatggcagtatccaaggattgtttgaattgatgaaactaccttatgtaggctgcggggtggcagcctctgccttatgtatgaacaaatggctgctgcatcaagcagcagaagcgattggcgtacaaagtgctcctacgattctcttgacaaatcaagccaaccagcaagatcaaatcgaagcttttatccagacccatggctttccggttttttttaagcctaatgaagcgggctcctcaaaagggatcactaaagtcacctgcgttgaagaaatcgcttctgccttaaaagaagcctttacttattgttcagcagtgctcctacaaaaaaatattgccggtgttgagatcggttgcggtattttgggcaacgactctttgactgtcggtgcttgtgacgctatttcattagtagacggctttttcgattttgaagaaaagtaccagctgatcagcgccaagatcaccgttcctgcaccattgcctgaaacgattgaaaccaaggtcaaagaacaagctcagctgctctatcgtagtctttgtcttaaaggtcttgctcgcatcgacttttttgtcacggatcaaggagaactatacttgaatgaaatcaatactatgccgggctttacgagtcactcccgctatcctgccatgatggcagcgatcggcttatcctatcaagaactactacaaaaactgcttgt

SEQ ID NO: 1062 - DNA, 1031 bp, Enterococcus casseliflavus strain R754
aaacatgaaaaaaatcgccattatttttggaggcaattcaccggaatacaccgtttctttagcttcagcaactagcgcaatcgaagcactccaatcatctccctatgactacgacctctctttgatcgggatcgccccagatgctatggattggtacttgtatacaggagaactggaaaacatccgacaagacacgtggttgttggatacgaaacataaacagaaaatacagccgctattcgaaggaaacggcttttggctaagtgaagagcagcaaacgttggtacctgatgttttatttcccattatgcatggcaaatacggggaagatggcagtatccaaggattgtttgaattgatgaagctgccttatgtaggctgcggggtggcaggttctgccttatgtatgaacaaatggctgctgcatcaagctgcagcagccattggcgtacaaagtgctcctacgattctcttgacaaatcaagccaaccagcaagaacaaatcgaagcttttatccagacccatggcttcccagttttctttaagcctaatgaagcgggctcctcaaaagggatcactaaagtcacctgcgttgaagaaatcgcttctgccttaaaagaagcctttacttattgttccgcagtgctcctacaaaaaaatattgccggtgttgagatcggttgcggtattttgggcaacgactctttgactgtcggtgcttgtgacgccatttcattagtagacggctttttcgattttgaagaaaagtaccagctgatcagcgccaaaatcaccgtccctgcgccattgcctgaaacgattgaaaccaaggtcaaagaacaagctcagctgctctatcgtagtcttggtcttaaaggtcttgctcgcatcgacttttttgtcacggagcgaggagaactatacttgaatgaaatcaatactatgccgggctttacgagtcactcccgctatcctgccatgatggcagcggtcggcttatcctatcaagaactactacaaaaactgcttg

SEQ ID NO: 1063 - DNA, 1030 bp, Enterococcus casseliflavus strain R775
aacatgaaaaaaatcgccattatttttggaggcaattcaccggaatacaccgtttctttagcttcagcaactagcgcaatcgaagcactccaatcatctccctatgactacgacctctctttgatcgggatcgccccagatgctatggattggtacttgtatacaggagaactggaaaacatccgacaagacacgtggttgttggatacgaaacataaacagaaaatacagccgctatttgaaggaaacggcttttggctaagtgaagagcagcaaacgttagtacctgatattttatttcccattatgcatggcaaatacggggaagatggcagtatccaaggattgtttgaattgatgaaactaccttatgtaggttgcggggtggcaggttctgccttatgtatgaacaaatggctgctgcatcaagctgcagcagccattggcgtacaaagtgctcctacgattctcttgacaaatcaagccaaccagcaagaacaaatcgaagcttttatccagacccatggcttcccagttttctttaagcctaatgaagcgggctcttcaaaagggatcactaaagtcacctgcgttgaagaaatcgcttctgccttaaaaaaagcctttacttattgttccgcagtgctcctacaaaaaaatattgccggtgttgagatcggttgcggtattttgggcaacgactctttgactgtcggtgcttgtgacgccatttcattagtagacggctttttcgattttgaagaaaagtaccagctgatcagcgccaaaatcaccgtccctgcgccattgcctgaaacgattgaaaccaaggtcaaagaacaagctcagctgctctatcgtagtcttggtcttaaaggtcttgctcgcatcgacttttttgtcacggatcaaggagaactatacttgaatgaaatcaatactatgccgggctttacgagtcactcccgttatcctgccatgatggcagcggtcggcttatcctatcaagaactactacaaaaactgcttg

SEQ ID NO: 1064 - DNA, 1032 bp, Enterococcus flavescens ATCC 49996
aaacatgaaaaaaatcgccattatttttggaggcaattcaccggaatacaccgtttctttagcttcagcaactagcgcaatcgaagcactccaatcatctccctatgactacgacctctctttgatcgggatcgccccagatgctatggattggtacttgtatacaggagaactggaaaacatccgacaagacacgtggttgttggatacgaaacagaaacagaaaatacagccgctattcgaaggaaacggcttttggttaagtgaagagcagcaaacgttggtacctgatgttttatttcccattatgcatggcaaatacggggaagatggcagtatccaaggattgtttgaattgatgaagctaccttatgtaggctgcggggtggcaggttctgccttatgtatgaacaaatggttgctgcatcaagctgcagcagccattggcgtacaaagtgctcctacgattctcttgacaaatcacgccaaccagcaagaacaaatcgaagcttttatccagacccatggctttccagttttctttaagcctaatgaagcgggttcctcaaaagggatcactaaagtcacctgcgttgaagaaatcgcttctgccttaaaagaagcctttacttattgttccgcagtgctcctacaaaaaaatattgccggtgttgagatcggttgcggtattttgggcaacgactctttgactgtcggtgcttgtgacgccatttcattagtagacggctttttcgattttgaagaaaagtaccagctgatcagcgccaaaatcaccgtccctgcgccattgcctgaaacgattgaaactaaggtcaaagaacaagctcagctgctctatcgtagtcttggacttaaaggtcttgctcgcatcgacttttttgtcacggatcaaggagaactatacttgaatgaaatcaatactatgccgggctttacgagtcactcccgctatcctgccatgatggcagcggtcgggttatcctatcaagaactactacaaaaactacttgt

SEQ ID NO: 1065 - DNA, 1034 bp, Enterococcus flavescens strain R758
aaaaacatgaaaaaaatcgccattatttttggaggcaattcaccggaatacaccgtttctttagcttcagcaactagcgcaatcgaagcactccaatcatctccctatgactacgacctctctttgatcgggatcgccccagatgctatggattggtacttgtatacaggagaactggaaaacatccgacaagacacgtggttgttggatacgaaacataaacagaaaatacagccgctattcgaaggaaacggcttttggctaagtgaagagcagcaaacgttggtacctgatgttttatttcccattatgcatggcaaatacggggaagatggcagtatccaaggattgtttgaattgatgaagctgccttatgtaggctgcggggtggcaagttctgccttatgtatgaacaaatggctgctgcatcaagctgcagcagccattggcgtacaaagtgctcctacgattctcttgacaaatcaagccaaccagcaagaacaaatcgaagcttttatccagacccatggctttccagttttctttaagcctaatgaagcgggctcctcaaaagggatcactaaagtcacctgcgttgaagaaatcgcttctgccttaaaagaagcctttacttattgttccgcagtgctcctacaaaaaaatattgccggtgttgagatcggttgcggtattttgggcaacgactctttgactgtcggtgcttgtgacgccatttcattagtagacggctttttcgattttgaagaaaagtaccagctgatcagcgccaaaatcaccgtccctgcgccattgcctgaaacgattgaaaccaaggtcaaagaacaagctcagctgctctatcgtagtcttggtcttaaaggtcttgctcgcatcgacttttttgtcacggatcaaggagaactatacttgaatgaaatcaatactatgccgggctttacgagtcactcccgctatcctgccatgatggcagcggtcggcttatcctatcaagaactactacaaaaactgcttgt

SEQ ID NO: 1066 - DNA, 1012 bp, Enterococcus flavescens strain R760
catgaaaaaaatcgccattatttttggaggcaattcaccggaatacaccgtttctttagcctcagcaactagcgcaatcgaagcactccaatcatctccctatgattacgacctctctttgatcgggatcgccccagatgctatggattggtacttgtatacaggagaactggaaaacatccgacaagacacgtggttgttggatacgaaacatacacagaaaatccagccactttttgaaggaaacggcttttggataagtgaagcgcagcaaacgttggtacctgatgttttatttcccattatgcatggtaaatacggggaagatggcagtatccaaggattgtttgaattgatgaagctgccttatgtaggctgtggggtggcagcctctgccttatgtatgaacaaatggttattgcatcaagcagcagcagcgattggcgtacaaagcgctcctacgattctcttgacaaatcaagccaaccagcaaagacaaatcgaagcctttatccagacccatggctttccagttttctttaagcctaatgaagcgggctcctcaaaagggatcacaaaagtaacttgtgttgaagaaatcgctcctgccttgaaggaagccttcgcttattgttccgcagtgctcttacaaaaaaatatcgctggcgttgagattggttgcggtatcttaggcaacgactctttgactgtcggtgcttgtgacgctatttcattagtagacggctttttcgattttgaagaaaagtaccagttgatcagcgccaaaatcaccgttcctgcgccattgcctgaaacgattgaaaccaaagtcaaagaacaagctcagctgctctatcacagtcttggtcttaaaggacttgctcgcatcgacttttttgtcacggatcaaggagaactatacttgaatgaaatcaatactatgccgggctttacgagtcactcccgctatcctgccatgatggcagcggtcggcttatcctatcaagaatta

SEQ ID NO: 1067 - DNA, 721 bp, Enterococcus faecium strain R481
  misc_feature (1)...(721): n=a,t,c or g
cttacgctttatcgattagacacgggnagcttgtccaatgggragccgatttgattttatggatgaacgctctcatcatgcggcaaatggaatatcatgcaatgaagcgcaaaatcgcagacgtttgcgctccatcatggaaaacagtgggtttgaagcatatagcctcgaatggtggcactatgtattaagagacgaaccataccccaatagctattttgatttccccgttaaataaacttttaaccgttgcacggacaaactatataagctaactctttcggcaggaaacccgacgtatgtaactggttcttagggaatttatatatagtagatagtattgaagatgtaaggcagagcgatattgcggtcattatctgcgtgcgctgcggcaagatagcctgataataagactgatcgcatagaggggtggtatttcacaccgcccattgtcaacaggcagttcagcctcgttaaattcagcatgggtatcacttatgaaaattcatctacattggtgataatagtaaatccagtagggcgaaataattgactgtaatttacggggcaaaacggcacaatctcaaacgagattgtgccgtttaaggggaagattctagaaatatttcatacttccaactatatagttaaggaggagactgaaaatgaagaagttgttttttttattgttattgttattcttaatatacttaggttattg

SEQ ID NO: 1068 - DNA, 668 bp, Enterococcus faecium strain R492
atttttaaggatgaacgctcttcatcatgcggcaaatggaatatcatgcaatgaagcgcaaaatcgcagacgtttgcgctccatcatggaaaacagtgggtttgaagcatatagcctcgaatggtggcactatgtattaagagacgaaccataccccaatagctattttgatttccccgttaaataaacttttaaccgttgcacggacaaactatataagctaactctttcggcaggaaacccgacgtatgtaactggttcttagggaatttatatatagtagatagtattgaagatgtaaggcagagcgatattgcggtcattatctgcgtgcgctgcggcaagatagcctgataataagactgatcgcatagaggggtggtatttcacaccgcccattgtcaacaggcagttcagcctcgttaaattcagcatgggtatcacttatgaaaattcatctacattggtgataatagtaaatccagtagggcgaaataattgactgtaatttacggggcaaaacggcacaatctcaaacgagattgtgccgtttaaggggaagattctagaaatatttcatacttccaactatatagttaaggaggagactgaaaatgaagaagttgttttttttattgttattgttattcttaatatacttaggttat

SEQ ID NO: 1069 - DNA, 760 bp, Enterococcus faecium strain R581
  misc_feature (1)...(760): n=a,t,c or g
cggcaagtgccattgatcttacgctttatcgattagacacgggtragcttgtaccaatgggaagccgatttgattttatggatgaacgctctcatcatgcggcaaatggaatatcatgcaatgaagcgcaaaatcgcagacgtttgcgctccatcatggaaaacagtgggtttgaagcatatagcctcgaatggtggcactatgtattaagagacgaaccataccccaatagctattttgatttccccgttaaataaacttttaaccgttgcacggacaaactatataagctaactctttcggcaggaaacccgacgtatgtaactggttcttagggaatttatatatagtagatagtattgaagatgtaaggcagagcgatattgcggtcattatctgcgtgcgctgcggcaagatagcctgataataagactgatcgcatagaggggtggtatttcacaccgcccattgtcaacaggcagttcagcctcgttaaattcagcatgggtatcacttatgaaaattcatctacattggtgataatagtaaatccagtagggcgaaataattgactgtaatttacggggcaaaacggcacaatctcaaacgagattgtgccgtttaaggggaagattctagaaatatttcatacttccaactatatagttaaggaggagactgaaaatgaagaagttgttttttttattgttattgttattcttaatatacttaggttatgactacgttaatgaaancctga

SEQ ID NO: 1070 - DNA, 801 bp, Enterococcus faecalis strain R610
  misc_feature (1)...(801): n=a,t,c or g
aaaaggaatacggggctttcaaaaatccaagccataacccgcgggcaagtgccatttgattcttacgctttaatcgattagacacgggtaagcttgtaccaatggggaaccgatttgattttaatgnatgaacgctcttcatcatgcggcaaatggaatatcatgcaatgaagcgcaaaatcgcagacgtttgcgctccatcatggaaaacagtgggtttgaagcatatagcctcgaatggtggcactatgtattaagagacgaaccataccccaatagctattttgatttccccgttaaataaacttttaaccgttgcacggacaaactatataagctaactctttcggcaggaaacccgacgtatgtaactggttcttagggaatttatatatagtagatagtattgaagatgtaaggcagagcgatattgcggtcattatctgcgtgcgctgcggcaagatagcctgataataagactgatcgcatagaggggtggtatttcacaccgcccattgtcaacaggcagttcagcctcgttaaattcagcatgggtatcacttatgaaaattcatctacattggtgataatagtaaatccagtagggcgaaataattgactgtaatttacggggcaaaacggcacaatctcaaacgagattgtgccgtttaaggggaagattctagaaatatttcatacttccaactatatagttaaggaggagactgaaaatgaagaagttgtttttttttattgttattgttattcttaatatacttaggttatgactacgttaatgaa

SEQ ID NO: 1071 - DNA, 711 bp, Enterococcus gallinarum strain R684
ttgtaccaatggggagccgatttgattttatggatgaacgctctcatcatgcggcaaatggaatatcatgcaatgaagcgcaaaatcgcagacgtttgcgctccatcatggaaaacagtgggtttgaagcatatagcctcgaatggtggcactatgtattaagagacgaaccataccccaatagctattttgatttccccgttaaataaacttttaaccgttgcacggacaaactatataagctaactctttcggcaggaaacccgacgtatgtaactggttcttagggaatttatatatagtagatagtattgaagatgtaaggcagagcgatattgcggtcattatctgcgtgcgctgcggcaagatagcctgataataagactgatcgcatagaggggtggtatttcacaccgcccattgtcaacaggcagttcagcctcgttaaattcagcatgggtatcacttatgaaaattcatctacattggtgataatagtaaatccagtagggcgaaataattgactgtaatttacggggcaaaacggcacaatctcaaacgagattgtgccgtttaaggggaagattctagaaatatttcatacttccaactatatagttaaggaggagactgaaaatgaagaagttgttttttttattgttattgttattcttaatatacttaggttatgactacgttaatgaagcactg

SEQ ID NO: 1072 - DNA, 751 bp, Enterococcus faecium strain R688
  misc_feature (1)...(751): n=a,t,c or g
gccattgatcttacgctttatcgattagacacgggtnagcttgtaccaatggggagccgatttgattttatggatgaacgctctcatcatgcggcaaatggaatatcatgcaatgaagcgcaaaatcgcagacgtttgcgctccatcatggaaaacagtgggtttgaagcatatagcctcgaatggtggcactatgtattaagagacgaaccataccccaatagctattttgatttccccgttaaataaacttttaaccgttgcacggacaaactatataagctaactctttcggcaggaaacccgacgtatgtaactggttcttagggaatttatatatagtagatagtattgaagatgtaaggcagagcgatattgcggtcattatctgcgtgcgctgcggcaagatagcctgataataagactgatcgcatagaggggtggtatttcacaccgcccattgtcaacaggcagttcagcctcgttaaattcagcatgggtatcacttatgaaaattcatctacattggtgataatagtaaatccagtagggcgaaataattgactgtaatttacggggcaaaacggcacaatctcaaacgagattgtgccgtttaaggggaagattctagaaatatttcatacttccaactatatagttaaggaggagactgaaaatgaagaagttgttttttttattgttattgttattcttaatatacttaggttatgactacgttaatgaagcactg

SEQ ID NO: 1073 - DNA, 685 bp, Enterococcus flavescens strain R689
atttgattttatggatgaacgctctcatcatgcggcaaatggaatatcatgcaatgaagcgcaaaatcgcagacgtttgcgctccatcatggaaaacagtgggtttgaagcatatagcctcgaatggtggcactatgtattaagagacgaaccataccccaatagctattttgatttccccgttaaataaacttttaaccgttgcacggacaaactatataagctaactctttcggcaggaaacccgacgtatgtaactggttcttagggaatttatatatagtagatagtattgaagatgtaaggcagagcgatattgcggtcattatctgcgtgcgctgcggcaagatagcctgataataagactgatcgcatagaggggtggtatttcacaccgcccattgtcaacaggcagttcagcctcgttaaattcagcatgggtatcacttatgaaaattcatctacattggtgataatagtaaatccagtagggcgaaataattgactgtaatttacggggcaaaacggcacaatctcaaacgagattgtgccgtttaaggggaagattctagaaatatttcatacttccaactatatagttaaggaggagactgaaaatgaagaagttgttttttttattgttattgttattcttaatatacttaggttatgactacgttaatga

SEQ ID NO: 1074 - DNA, 732 bp, Enterococcus faecium strain R690
atcgattagacacgggtgagcttgtaccaatggggagccgatttgattttatggatgaacgctctcatcatgcggcaaatggaatatcatgcaatgaagcgcaaaatcgcagacgtttgcgctccatcatggaaaacagtgggtttgaagcatatagcctcgaatggtggcactatgtattaagagacgaaccataccccaatagctattttgatttccccgttaaataaacttttaaccgttgcacggacaaactatataagctaactctttcggcaggaaacccgacgtatgtaactggttcttagggaatttatatatagtagatagtattgaagatgtaaggcagagcgatattgcggtcattatctgcgtgcgctgcggcaagatagcctgataataagactgatcgcatagaggggtggtatttcacaccgcccattgtcaacaggcagttcagcctcgttaaattcagcatgggtatcacttatgaaaattcatctacattggtgataatagtaaatccagtagggcgaaataattgactgtaatttacggggcaaaacggcacaatctcaaacgagattgtgccgtttaaggggaagattctagaaatatttcatacttccaactatatagttaaggaggagactgaaaatgaagaagttgttttttttattgttattgttattcttaatatacttaggttatgactacgttaatgaagcactg

SEQ ID NO: 1075 - DNA, 670 bp, Enterococcus gallinarum strain R691
tctcatcatgcggcaaatggaatatcatgcaatgaagcgcaaaatcgcagacgtttgcgctccatcatggaaaacagtgggtttgaagcatatagcctcgaatggtggcactatgtattaagagacgaaccataccccaatagctattttgatttccccgttaaataaacttttaaccgttgcacggacaaactatataagctaactctttcggcaggaaacccgacgtatgtaactggttcttagggaatttatatatagtagatagtattgaagatgtaaggcagagcgatattgcggtcattatctgcgtgcgctgcggcaagatagcctgataataagactgatcgcatagaggggtggtatttcacaccgcccattgtcaacaggcagttcagcctcgttaaattcagcatgggtatcacttatgaaaattcatctacattggtgataatagtaaatccagtagggcgaaataattgactgtaatttacggggcaaaacggcacaatctcaaacgagattgtgccgtttaaggggaagattctagaaatatttcatacttccaactatatagttaaggaggagactgaaaatgaagaagttgttttttttattgttattgttattcttaatatacttaggttatgactacgttaatgaagcactg

SEQ ID NO: 1076 - DNA, 948 bp, Escherichia coli strain DG131/3
atgaaaataataatttttagagtgctaacttttttctttgttatcttttctgttaatgtggttgcgaaggaatttaccttagatttctcgacagcaaagacgtatgtagattcgctgaatgtcattcgctctgcaataggtactccattacagactatttcatcaggaggtacgtctttactgatgattgatagtggcacaggggataatttgtttgcagttgatgtcagagggatagatccagaggaagggcggtttaataatctacggcttattgttgaacgaaataatttatatgtgacaggatttgttaacaggacaaataatgttttttatcgctttgctgatttttcacatgttacctttcctggtacaactgcggttacattgtctggtgacagtagctataccacgttacagcgtgttgcggggatcagtcgtacggggatgcagataaatcgccattcgttgactacttcttatctggatttaatgtcgcatagcggaacctcactgacgcagtctgtggcaagagcgatgttacggtttgttactgtgacagctgaagctttacgttttcggcaaattcagaggggatttcgtacaacacttgatgatctcagtgggcgttcttatgtaatgactgctgaagatgttgatcttacgttgaactggggaaggttgagtagtgtcctgcctgactatcatggacaagactctgttcgtgttggaagaatttcttttggaagtgttaatgcaattctgggtagcgtggcattaatactgaattgtcatcatcatgcatcgcgagttgccagaattgtacctaatgagtttccttctatgtgcccggtagatggaagagtgcgtgggattacgcacaataaaatattgtgggactcatccactctgggggcaattttgatacgcagggctattagcagttga

SEQ ID NO: 1077 - DNA, 1259 bp, Escherichia coli strain 94C
cacctgtatatgaagtgtatattatttaaatgggtactgtgcctgttactgggtttttcttcggtatcctattcccgggagtttacgatagacttttcgacccaacaaagttatgtctcttcgttaaatagtatacggacagagatatcgacccctcttgaacatatatctcaggggaccacatcggtgtctgttattaaccacaccccaccgggcagttattttgctgtggatatacgagggcttgatgtctatcaggcgcgttttgaccatcttcggctgattattgagcaaaataatttatatgtggccgggttcgttaatacggcaacaaatactttctaccgtttttcagattttacacatatatcagtgcccgatgtgacaacggtttccatgacaacggacagcagttataccactctgcaacgtgtcgcagcgctggaacgttccggaatgcaaatcagtcgtcactcactggtttcatcatatctggcgttaatggagttcagtggtaatacaatgaccagagatgcatccagagcagttctgcgttttgtcactgtcacagcagaagccttacgcttcaggcagatacagagagaatttcgtcaggcactgtctgaaactgctcctgtgtataccatgacgccgggagacgtggacctcactctgaactgggggcgaatcagcaatgtgcttccggagtatcggggagaggatggtgtcagagtggggagaatatcctttaataatatatcagcgatactgggtactgtggccgttatactgaattgccatcatcagggggcgcgttctgttcgcgccgtgaatgaagagagtcaaccagaatgtcagataactggcgacaggcccgttataaaaataaacaatacattatgggaaagtaatacagctgcagcgtttctgaacagaaagtcacagtttttatatacaacgggtaaataaaggagttaagtatgaagaagatgtttatggcggttttatttgcattagtttctgttaatgcaatggcggcggattgtgctaaaggtaaaattgagttttccaagtataatgaggatgacacatttacagtgaaggttgacgggaaagaatactggaccagtcgctggaatctgcaaccgttactgcaaagtgctcagctgacaggaatgactgtcacaatcaaatccagtacctgtgaatcaggctccggatttgctgaagtgcagtttaataatgactgaggcataacc

SEQ ID NO: 1078 - DNA, 22 bp, Artificial Sequence
  Synthetic DNA Sequence
agttctgcgttttgtcactgtc

SEQ ID NO: 1079 - DNA, 19 bp, Artificial Sequence
  Synthetic DNA Sequence
cggaagcacattgctgatt

SEQ ID NO: 1080 - DNA, 25 bp, Artificial Sequence
  Synthetic DNA Sequence
tatagctactgtcaccagacaatgt

SEQ ID NO: 1081 - DNA, 20 bp, Artificial Sequence
  Synthetic DNA Sequence
atgtcagagggatagatcca

SEQ ID NO: 1082 - DNA, 23 bp, Artificial Sequence
  Synthetic DNA Sequence
ttgarcraaataatttatatgtg

SEQ ID NO: 1083 - DNA, 20 bp, Artificial Sequence
  Synthetic DNA Sequence
tgatgatgrcaattcagtat

SEQ ID NO: 1084 - DNA, 39 bp, Artificial Sequence
  Synthetic DNA Sequence
ccacgccgctttgctgatttttcacatgttaccgcgtgg

SEQ ID NO: 1085 - DNA, 34 bp, Artificial Sequence
  Synthetic DNA Sequence
ccacgccactgtctgaaactgctcctgtgcgtgg

SEQ ID NO: 1086 - DNA, 20 bp, Artificial Sequence
  Synthetic DNA Sequence
ctactcccgccttttgggtt

SEQ ID NO: 1087 - DNA, 20 bp, Artificial Sequence
  Synthetic DNA Sequence
ctcacagcccgaaacagcct

SEQ ID NO: 1088 - DNA, 20 bp, Artificial Sequence
  Synthetic DNA Sequence
tgccgtttcctgtatccgtc

SEQ ID NO: 1089 - DNA, 20 bp, Artificial Sequence
  Synthetic DNA Sequence
atccacacgggctagacctc

SEQ ID NO: 1090 - DNA, 21 bp, Artificial Sequence
  Synthetic DNA Sequence
aatagcgcggacgaattggac

SEQ ID NO: 1091 - DNA, 20 bp, Artificial Sequence
  Synthetic DNA Sequence
aacgcggcactgtttcccaa

SEQ ID NO: 1092 - DNA, 21 bp, Artificial Sequence
  Synthetic DNA Sequence
tcggcaagacaatatgacagc

SEQ ID NO: 1093 - DNA, 381 bp, Staphylococcus saprophyticus strain CSsa-165
taacgggcgtctcgatagaaaaacacgtgaaaatcccaatgattataaacaatcaatatacgattttgctgaagctgtaacaaaaggtattaaggaacaaacaaataaaaattaataggcaacttaaccagaatcgttaaaactatatgacgattctggttttttaaattcaaaaagttttctaaaaaatttacctgcttttttaaagtataggtataaaatacaattgattaaaatagtaaaggaaatgaatcatgaaacaattaactaagcctttatacttttacctattactttttattacaacaacactgattggcgcgttactattatatttgccaatcacaggtaaacatcctattgattttgtggacgcccgtt

SEQ ID NO: 1094 - DNA, 23 bp, Artificial Sequence
  Synthetic DNA Sequence
ggtaaaacaggtacttctaacta

SEQ ID NO: 1095 - DNA, 20 bp, Artificial Sequence
  Synthetic DNA Sequence
cgatagaagcagcaggacaa

SEQ ID NO: 1096 - DNA, 20 bp, Artificial Sequence
  Synthetic DNA Sequence
ctgatggatgcggaagatac

SEQ ID NO: 1097 - DNA, 26 bp, Artificial Sequence
  Synthetic DNA Sequence
tcytcaaaagggatcacwaaagtmac

SEQ ID NO: 1098 - DNA, 23 bp, Artificial Sequence
  Synthetic DNA Sequence
tcttcaaaatcgaaaaagccgtc

SEQ ID NO: 1099 - DNA, 23 bp, Artificial Sequence
  Synthetic DNA Sequence
tcaaaagggatcacwaaagtmac

SEQ ID NO: 1100 - DNA, 26 bp, Artificial Sequence
  Synthetic DNA Sequence
gtaaakcccggcatrgtrttgatttc

SEQ ID NO: 1101 - DNA, 23 bp, Artificial Sequence
  Synthetic DNA Sequence
gacggytttttygattttgaaga

SEQ ID NO: 1102 - DNA, 23 bp, Artificial Sequence
  Synthetic DNA Sequence
aaaaartcgatkcgagcmagacc

SEQ ID NO: 1103 - DNA, 20 bp, Artificial Sequence
  Synthetic DNA Sequence
atcccgctatgaaaacgatc

SEQ ID NO: 1104 - DNA, 20 bp, Artificial Sequence
  Synthetic DNA Sequence
ggatcaacacagtagaaccg

SEQ ID NO: 1105 - DNA, 25 bp, Artificial Sequence
  Synthetic DNA Sequence
ctcctacgattctcttgayaaatca

SEQ ID NO: 1106 - DNA, 23 bp, Artificial Sequence
  Synthetic DNA Sequence
caaccgatctcaacaccggcaat

SEQ ID NO: 1107 - DNA, 23 bp, Artificial Sequence
  Synthetic DNA Sequence
ctcatttgacttcctcctttgct

SEQ ID NO: 1108 - DNA, 23 bp, Artificial Sequence
  Synthetic DNA Sequence
gtaagaatcggaaaagcggaagg

SEQ ID NO: 1109 - DNA, 23 bp, Artificial Sequence
  Synthetic DNA Sequence
acatcgtgatcgctaaaaggagc

SEQ ID NO: 1110 - DNA, 23 bp, Artificial Sequence
  Synthetic DNA Sequence
acgagaaagacaacaggaagacc

SEQ ID NO: 1111 - DNA, 25 bp, Artificial Sequence
  Synthetic DNA Sequence
ctttttccggctcgwyttcctgatg

SEQ ID NO: 1112 - DNA, 20 bp, Artificial Sequence
  Synthetic DNA Sequence
ggctgygatattcaaagctc

SEQ ID NO: 1113 - DNA, 20 bp, Artificial Sequence
  Synthetic DNA Sequence
accgacctcacagcccgaaa

SEQ ID NO: 1114 - DNA, 21 bp, Artificial Sequence
  Synthetic DNA Sequence
tcwgagcctttttccggctcg

SEQ ID NO: 1115 - DNA, 26 bp, Artificial Sequence
  Synthetic DNA Sequence
tttcgggctgtgaggtcggbtghgcg

SEQ ID NO: 1116 - DNA, 27 bp, Artificial Sequence
  Synthetic DNA Sequence
tttcgggctgtgaggtcggbtghgcgg

SEQ ID NO: 1117 - DNA, 801 bp, Enterococcus faecium strain U94526
aaattcgatccgcactacatcggaattacaaaaaacggtgtatggaagctatgcaagaagccatgtacggaatgggaagccgacagtctccccgccatactctccccggataggaaaacgcatgggctgcttgtcatgaaagaaagcgaatacgaaacacggcgtattgatgtggctttcccggttttgcatggcaaatgcggggaggatggtgcgatacaggggctgtttgtattgtctggtatcccctatgtgggctgtgatattcaaagctccgcagcttgcatggacaaatcactggcctacattcttacaaaaaatgcgggcatcgccgttcccgaatttcaaatgattgataaaggtgacaagccggaggcgggtgcgcttacctaccctgtctttgtgaagccggcacggtcaggttcgtcctttggcgtaaccaaagtaaacggtacggaagaacttaacgctgcgatagaagcggcaggacaatatgatggaaaaatcttaattgagcaagcgatttcgggctgtgaggtcgggtgtgcggtcatggggaacgaggatgatttgattgtcggcgaagtggatcaaatccggctgagccacggtatcttccgcatccatcaggaaaacgagccggaaaaaggctcagaaaatgcgatgattacagttcccgcagacattccggtcgaggaacgaaatcgggtgcaggaaacggcaaagaaagtatatcgggtgcttggatgcagagggcttgcccgtgttgatctttttttgcaggaggatggcggcatcgtt

SEQ ID NO: 1118 - DNA, 24 bp, Artificial Sequence
  Synthetic DNA Sequence
ttttcwgagcctttttccggctcg

SEQ ID NO: 1119 - DNA, 25 bp, Artificial Sequence
  Synthetic DNA Sequence
tttcgggctgtgaggtcggbtghgc

SEQ ID NO: 1120 - DNA, 24 bp, Artificial Sequence
  Synthetic DNA Sequence
tttcgggctgtgaggtcggbtghg

SEQ ID NO: 1121 - DNA, 22 bp, Artificial Sequence
  Synthetic DNA Sequence
tgtttgwattgtcyggyatccc

SEQ ID NO: 1122 - DNA, 18 bp, Artificial Sequence
  Synthetic DNA Sequence
tggtgcattgctacgtgg

SEQ ID NO: 1123 - DNA, 22 bp, Artificial Sequence
  Synthetic DNA Sequence
tttcgggctgtgaggtcggbtg

SEQ ID NO: 1124 - DNA, 22 bp, Artificial Sequence
  Synthetic DNA Sequence
gatttgrtccacytcgccraca

SEQ ID NO: 1125 - DNA, 20 bp, Artificial Sequence
  Synthetic DNA Sequence
actcacaactgggatggatg

SEQ ID NO: 1126 - DNA, 21 bp, Artificial Sequence
  Synthetic DNA Sequence
ttatggttgtgctggttgagg

SEQ ID NO: 1127 - DNA, 20 bp, Artificial Sequence
  Synthetic DNA Sequence
kcaaaygccatttcaagtaa

SEQ ID NO: 1128 - DNA, 20 bp, Artificial Sequence
  Synthetic DNA Sequence
gacgacyttatkgatataca

SEQ ID NO: 1129 - DNA, 23 bp, Artificial Sequence
  Synthetic DNA Sequence
atgatgachgamatgatgaaaac

SEQ ID NO: 1130 - DNA, 22 bp, Artificial Sequence
  Synthetic DNA Sequence
gactatccaagcatgcattatg

SEQ ID NO: 1131 - DNA, 22 bp, Artificial Sequence
  Synthetic DNA Sequence
catctggagctacrtarccagt

SEQ ID NO: 1132 - DNA, 20 bp, Artificial Sequence
  Synthetic DNA Sequence
agtgaaaaratggctgctgc

SEQ ID NO: 1133 - DNA, 23 bp, Artificial Sequence
  Synthetic DNA Sequence
catcaagaacactggctaygtag

SEQ ID NO: 1134 - DNA, 23 bp, Artificial Sequence
  Synthetic DNA Sequence
ctagatagagctaaaaccttcct

SEQ ID NO: 1135 - DNA, 23 bp, Artificial Sequence
  Synthetic DNA Sequence
cattatgcaaacgccatttcaag

SEQ ID NO: 1136 - DNA, 21 bp, Artificial Sequence
  Synthetic DNA Sequence
acttgtccacgttsgatrtct

SEQ ID NO: 1137 - DNA, 23 bp, Artificial Sequence
  Synthetic DNA Sequence
aattaatggctgcwgttgaygaa

SEQ ID NO: 1138 - DNA, 1032 bp, Enterococcus gallinarum
atgaaaaaaattgccgttttatttggagggaattctccagaatactcagtgtcactaacctcagcagcaagtgtgatccaagctattgacccgctgaaatatgaagtaatgaccattggcatcgcaccaacaatggattggtattggtatcaaggaaacctcgcgaatgttcgcaatgatacttggctagaagatcacaaaaactgtcaccagctgactttttctagccaaggatttatattaggagaaaaacgaatcgtccctgatgtcctctttccagtcttgcatgggaagtatggcgaggatggctgtatccaaggactgcttgaactaatgaacctgccttatgttggttgccatgtcgctgcctccgcattatgtatgaacaaatggctcttgcatcaacttgctgataccatgggaatcgctagtgctcccactttgcttttatcccgctatgaaaacgatcctgccacaatcgatcgttttattcaagaccatggattcccgatctttatcaagccgaatgaagccggttcttcaaaagggatcacaaaagtaactgacaaaacagcgctccaatctgcattaacgactgcttttgcttacggttctactgtgttgatccaaaaggcgatagcgggtattgaaattggctgcggcatcttaggaaatgagcaattgacgattggtgcttgtgatgcgatttctcttgtcgacggtttttttgattttgaagagaaataccaattaatcagcgccacgatcactgtcccagcaccattgcctctcgcgcttgaatcacagatcaaggagcaggcacagctgctttatcgaaacttgggattgacgggtctggctcgaatcgattttttcgtcaccaatcaaggagcgatttatttaaacgaaatcaacaccatgccgggatttactgggcactcccgctacccagctatgatggcggaagtcgggttatcctacgaaatattagtagagcaattgattgcactggcagaggaggacaaacgatga

SEQ ID NO: 1139 - DNA, 1768 bp, Enterococcus faecium strain BM4147
gatatcgttacgcttcatgtgccgctcaatacggatacgcactatattatcagccacgaacaaatacagagaatgaagcaaggagcatttcttatcaatactgggcgcggtccacttgtagatacctatgagttggttaaagcattagaaaacgggaaactgggcggtgccgcattggatgtattggaaggagaggaagagtttttctactctgattgcacccaaaaaccaattgataatcaatttttacttaaacttcaaagaatgcctaacgtgataatcacaccgcatacggcctattataccgagcaagcgttgcgtgataccgttgaaaaaaccattaaaaactgtttggattttgaaaggagacaggagcatgaatagaataaaagttgcaatactgtttgggggttgctcagaggagcatgacgtatcggtaaaatctgcaatagagatagccgctaacattaataaagaaaaatacgagccgttatacattggaattacgaaatctggtgtatggaaaatgtgcgaaaaaccttgcgcggaatgggaaaacgacaattgctattcagctgtactctcgccggataaaaaaatgcacggattacttgttaaaaagaaccatgaatatgaaatcaaccatgttgatgtagcattttcagctttgcatggcaagtcaggtgaagatggatccatacaaggtctgtttgaattgtccggtatcccttttgtaggctgcgatattcaaagctcagcaatttgtatggacaaatcgttgacatacatcgttgcgaaaaatgctgggatagctactcccgccttttgggttattaataaagatgataggccggtggcagctacgtttacctatcctgtttttgttaagccggcgcgttcaggctcatccttcggtgtgaaaaaagtcaatagcgcggacgaattggactacgcaattgaatcggcaagacaatatgacagcaaaatcttaattgagcaggctgtttcgggctgtgaggtcggttgtgcggtattgggaaacagtgccgcgttagttgttggcgaggtggaccaaatcaggctgcagtacggaatctttcgtattcatcaggaagtcgagccggaaaaaggctctgaaaacgcagttataaccgttcccgcagacctttcagcagaggagcgaggacggatacaggaaacggcaaaaaaaatatataaagcgctcggctgtagaggtctagcccgtgtggatatgtttttacaagataacggccgcattgtactgaacgaagtcaatactctgcccggtttcacgtcatacagtcgttatccccgtatgatggccgctgcaggtattgcacttcccgaactgattgaccgcttgatcgtattagcgttaaaggggtgataagcatggaaataggatttacttttttagatgaaatagtacacggtgttcgttgggacgctaaatatgccacttgggataatttcaccggaaaaccggttgacggttatgaagtaaatcgcattgtagggacatacgagttggctgaatcgcttttgaaggcaaaagaactggctgctacccaagggtacggattgcttctatgggacggttaccgtcctaagcgtgctgtaaactgttttatgcaatgggctgcacagccggaaaataacctgacaaaggaaagttattatcccaatattgaccgaactgagatgatttcaaaaggatacgtggcttcaaaatcaagccatagccgcg

SEQ ID NO: 1140 - DNA, 1086 bp, Enterococcus casseliflavus
gtaagaatcggaaaagcggaaggaagaaaaacatgaaaaaaatcgccattatttttggaggcaattcaccggaatacaccgtttctttagcttcagcaactagcgcaatcgaagcactccaatcatctccctatgactacgacctctctttgatcgggatcgccccagatgctatggattggtacttgtatacaggagaactggaaaacatccgacaagacacgtggttgttggatacgaaacataaacagaaaatacagccgctattcgaaggaaacggcttttggctaagtgaagagcagcaaacgttggtacctgatgttttatttcccattatgcatggcaaatacggggaagatggcagtatccaaggattgtttgaattgatgaagctgccttatgtaggctgcggggtggcaggttctgccttatgtatgaacaaatggctgctgcatcaagctgcagcagccattggcgtacaaagtgctcctacgattctcttgacaaatcaagccaaccagcaagaacaaatcgaagcttttatccagacccatggcttcccagttttctttaagcctaatgaagcgggctcctcaaaagggatcactaaagtcacctgcgttgaagaaatcgcttctgccttaaaagaagcctttacttattgttccgcagtgctcctacaaaaaaatattgccggtgttgagatcggttgcggtattttgggcaacgactctttgactgtcggtgcttgtgacgccatttcattagtagacggctttttcgattttgaagaaaagtaccagctgatcagcgccaaaatcaccgtccctgcgccattgcctgaaacgattgaaaccaaggtcaaagaacaagctcagctgctctatcgtagtcttggtcttaaaggtcttgctcgcatcgacttttttgtcacggagcgaggagaactatacttgaatgaaatcaatactatgccgggctttacgagtcactcccgctatcctgccatgatggcagcggtcggcttatcctatcaagaactactacaaaaactgcttgtcttagcaaaggaggaagtcaaatgag

SEQ ID NO: 1141 - DNA, 3946 bp, Enterococcus faecium strain BM4147
atgaataacatcggcattactgtttatggatgtgagcaggatgaggcagatgcattccatgctctttcgcctcgctttggcgttatggcaacgataattaacgccaacgtgtcggaatccaacgccaaatccgcgcctttcaatcaatgtatcagtgtgggacataaatcagagatttccgcctctattcttcttgcgctgaagagagccggtgtgaaatatatttctacccgaagcatcggctgcaatcatatagatacaactgctgctaagagaatgggcatcactgtcgacaatgtggcgtactcgccggatagcgttgccgattatactatgatgctaattcttatggcagtacgcaacgtaaaatcgattgtgcgctctgtggaaaaacatgatttcaggttggacagcgaccgtggcaaggtactcagcgacatgacagttggtgtggtgggaacgggccagataggcaaagcggttattgagcggctgcgaggatttggatgtaaagtgttggcttatagtcgcagccgaagtatagaggtaaactatgtaccgtttgatgagttgctgcaaaatagcgatatcgttacgcttcatgtgccgctcaatacggatacgcactatattatcagccacgaacaaatacagagaatgaagcaaggagcatttcttatcaatactgggcgcggtccacttgtagatacctatgagttggttaaagcattagaaaacgggaaactgggcggtgccgcattggatgtattggaaggagaggaagagtttttctactctgattgcacccaaaaaccaattgataatcaatttttacttaaacttcaaagaatgcctaacgtgataatcacaccgcatacggcctattataccgagcaagcgttgcgtgataccgttgaaaaaaccattaaaaactgtttggattttgaaaggagacaggagcatgaatagaataaaagttgcaatactgtttgggggttgctcagaggagcatgacgtatcggtaaaatctgcaatagagatagccgctaacattaataaagaaaaatacgagccgttatacattggaattacgaaatctggtgtatggaaaatgtgcgaaaaaccttgcgcggaatgggaaaacgacaattgctattcagctgtactctcgccggataaaaaaatgcacggattacttgttaaaaagaaccatgaatatgaaatcaaccatgttgatgtagcattttcagctttgcatggcaagtcaggtgaagatggatccatacaaggtctgtttgaattgtccggtatcccttttgtaggctgcgatattcaaagctcagcaatttgtatggacaaatcgttgacatacatcgttgcgaaaaatgctgggatagctactcccgccttttgggttattaataaagatgataggccggtggcagctacgtttacctatcctgtttttgttaagccggcgcgttcaggctcatccttcggtgtgaaaaaagtcaatagcgcggacgaattggactacgcaattgaatcggcaagacaatatgacagcaaaatcttaattgagcaggctgtttcgggctgtgaggtcggttgtgcggtattgggaaacagtgccgcgttagttgttggcgaggtggaccaaatcaggctgcagtacggaatctttcgtattcatcaggaagtcgagccggaaaaaggctctgaaaacgcagttataaccgttcccgcagacctttcagcagaggagcgaggacggatacaggaaacggcaaaaaaaatatataaagcgctcggctgtagaggtctagcccgtgtggatatgtttttacaagataacggccgcattgtactgaacgaagtcaatactctgcccggtttcacgtcatacagtcgttatccccgtatgatggccgctgcaggtattgcacttcccgaactgattgaccgcttgatcgtattagcgttaaaggggtgataagcatggaaataggatttacttttttagatgaaatagtacacggtgttcgttgggacgctaaatatgccacttgggataatttcaccggaaaaccggttgacggttatgaagtaaatcgcattgtagggacatacgagttggctgaatcgcttttgaaggcaaaagaactggctgctacccaagggtacggattgcttctatgggacggttaccgtcctaagcgtgctgtaaactgttttatgcaatgggctgcacagccggaaaataacctgacaaaggaaagttattatcccaatattgaccgaactgagatgatttcaaaaggatacgtggcttcaaaatcaagccatagccgcggcagtgccattgatcttacgctttatcgattagacacgggtgagcttgtaccaatggggagccgatttgattttatggatgaacgctctcatcatgcggcaaatggaatatcatgcaatgaagcgcaaaatcgcagacgtttgcgctccatcatggaaaacagtgggtttgaagcatatagcctcgaatggtggcactatgtattaagagacgaaccataccccaatagctattttgatttccccgttaaataaacttttaaccgttgcacggacaaactatataagctaactctttcggcaggaaacccgacgtatgtaactggttcttagggaatttatatatagtagatagtattgaagatgtaaggcagagcgatattgcggtcattatctgcgtgcgctgcggcaagatagcctgataataagactgatcgcatagaggggtggtatttcacaccgcccattgtcaacaggcagttcagcctcgttaaattcagcatgggtatcacttatgaaaattcatctacattggtgataatagtaaatccagtagggcgaaataattgactgtaatttacggggcaaaacggcacaatctcaaacgagattgtgccgtttaaggggaagattctagaaatatttcatacttccaactatatagttaaggaggagactgaaaatgaagaagttgttttttttattgttattgttattcttaatatacttaggttatgactacgttaatgaagcactgttttctcaggaaaaagtcgaatttcaaaattatgatcaaaatcccaaagaacatttagaaaatagtgggacttctgaaaatacccaagagaaaacaattacagaagaacaggtttatcaaggaaatctgctattaatcaatagtaaatatcctgttcgccaagaaagtgtgaagtcagatatcgtgaatttatctaaacatgacgaattaataaatggatacgggttgcttgatagtaatatttatatgtcaaaagaaatagcacaaaaattttcagagatggtcaatgatgctgtaaagggtggcgttagtcattttattattaatagtggctatcgagactttgatgagcaaagtgtgctttaccaagaaatgggggctgagtatgccttaccagcaggttatagtgagcataattcaggtttatcactagatgtaggatcaagcttgacgaaaatggaacgagcccctgaaggaaagtggatagaagaaaatgcttggaaatacgggttcattttacgttatccagaggacaaaacagagttaacaggaattcaatatgaaccatggcatattcgctatgttggtttaccacatagtgcgattatgaaagaaaagaatttcgttctcgaggaatatatggattacctaaaagaagaaaaaaccatttctgttagtgtaaatggggaaaaatatgagatcttttattatcctgttactaaaaataccaccattcatgtgccgactaatcttcgttatgagatatcaggaaacaatatagacggtgtaattgtgacagtgtttcccggatcaacacatactaattcaaggaggtaa

SEQ ID NO: 1142 - DNA, 25 bp, Artificial Sequence
  Synthetic DNA Sequence
gatcctctaaatgattctcaggtgg

SEQ ID NO: 1143 - DNA, 25 bp, Artificial Sequence
  Synthetic DNA Sequence
caattagcttagcaataggtgttgg

SEQ ID NO: 1144 - DNA, 20 bp, Artificial Sequence
  Synthetic DNA Sequence
tgtyttccaaggttcagctc

SEQ ID NO: 1145 - DNA, 20 bp, Artificial Sequence
  Synthetic DNA Sequence
aacatattkggttgataggt

SEQ ID NO: 1146 - DNA, 23 bp, Artificial Sequence
  Synthetic DNA Sequence
gggattacctatgccaatatgat

SEQ ID NO: 1147 - DNA, 24 bp, Artificial Sequence
  Synthetic DNA Sequence
agctgtgttagcvcgaacatcttg

SEQ ID NO: 1148 - DNA, 20 bp, Artificial Sequence
  Synthetic DNA Sequence
gactttgtttggcgtgatat

SEQ ID NO: 1149 - DNA, 20 bp, Artificial Sequence
  Synthetic DNA Sequence
tccyacwatttctttttgwg

SEQ ID NO: 1150 - DNA, 20 bp, Artificial Sequence
  Synthetic DNA Sequence
tgataatcacaccgcatacg

SEQ ID NO: 1151 - DNA, 20 bp, Artificial Sequence
  Synthetic DNA Sequence
tgctgtcatattgtcttgcc

SEQ ID NO: 1152 - DNA, 20 bp, Artificial Sequence
  Synthetic DNA Sequence
ataaagatgataggccggtg

SEQ ID NO: 1153 - DNA, 20 bp, Artificial Sequence
  Synthetic DNA Sequence
ctcgtatgtccctacaatgc

SEQ ID NO: 1154 - DNA, 20 bp, Artificial Sequence
  Synthetic DNA Sequence
gtttgaagcatatagcctcg

SEQ ID NO: 1155 - DNA, 21 bp, Artificial Sequence
  Synthetic DNA Sequence
cagtgcttcattaacgtagtc

SEQ ID NO: 1156 - DNA, 23 bp, Artificial Sequence
  Synthetic DNA Sequence
gttgaaatgcatcacgaacaatt

SEQ ID NO: 1157 - DNA, 23 bp, Artificial Sequence
  Synthetic DNA Sequence
aagaacgtttcagttaaggaaat

SEQ ID NO: 1158 - DNA, 19 bp, Artificial Sequence
  Synthetic DNA Sequence
aagaggtaatgtctgtggt

SEQ ID NO: 1159 - DNA, 18 bp, Artificial Sequence
  Synthetic DNA Sequence
tgaaggtttgccaggtga

SEQ ID NO: 1160 - DNA, 24 bp, Artificial Sequence
  Synthetic DNA Sequence
cgtttctgttaaagaaattagaag

SEQ ID NO: 1161 - DNA, 18 bp, Artificial Sequence
  Synthetic DNA Sequence
tccaggtgataacgttgg

SEQ ID NO: 1162 - DNA, 18 bp, Artificial Sequence
  Synthetic DNA Sequence
caagtccgtggaaatgca

SEQ ID NO: 1163 - DNA, 21 bp, Artificial Sequence
  Synthetic DNA Sequence
gttggtttcaacgttaagaac

SEQ ID NO: 1164 - DNA, 18 bp, Artificial Sequence
  Synthetic DNA Sequence
ggtttcaacgtcaagaac

SEQ ID NO: 1165 - DNA, 18 bp, Artificial Sequence
  Synthetic DNA Sequence
ggtttcaacgtgaagaac

SEQ ID NO: 1166 - DNA, 22 bp, Artificial Sequence
  Synthetic DNA Sequence
acgttaagaatgtttctgtcaa

SEQ ID NO: 1167 - DNA, 14 bp, Artificial Sequence
  Synthetic DNA Sequence
gttggtttcaacgt

SEQ ID NO: 1168 - DNA, 20 bp, Artificial Sequence
  Synthetic DNA Sequence
gaacaattggttgaaggtgt

SEQ ID NO: 1169 - DNA, 2160 bp, Streptococcus pneumoniae strain SP-665
atgaacaaaccaacgattctgcgcctaatcaagtatctgagcattagcttcttaagcttggttatcgcagccattgtcttaggcggaggagtttttttctactacgttagcaaggctcctagcctatccgagagtaaactagttgcaacaacttctagtaaaatctacgacaataaaaatcaactcattgctgacttgggttctgaacgccgcgtcaatgcccaagctaatgatattcccacagatttggttaaggcaatcgtttctatcgaagaccatcgcttcttcgaccacagggggattgattccatccgtatcctgggagctttcttgcgcaatctgcaaagtaattccctccaaggtggatcaactctcacccaacagttgattaagttgacttacttttcaacctcgacttccgaccagactatttctcgtaaggctcaggaagcttggttagcgattcagttagaacaaaaagcaaccaaacaggaaatcttgacctactatataaataaggtctacatgtctaatggcaactatggaatgcagacagcagctcaaaactactatggtaaagacctcaataatttaagtttacctcagttagccttgctggctggaatgcctcaggcaccaaaccaatatgacccctattcacatccagaagcagcccaagaccgccgaaacttggtcttatctgaaatgaaaaatcaaggttacatctctgctgaacagtatgagaaagcagtcaatacaccaattactgatggactacaaagtctcaaatcagcaagtaattaccctgcttacatggataattacctcaaggaggtcatcaatcaagtagaacaagaaactggctataaccttctaactactgggatggatgtttacacaaatgtagaccaagaagctcaaaaacatctgtgggatatctacaactccgatcaatacgtctcttaccctgacgatgatttgcaagtcgcatctacggtcgtagatgtttcaaatggtaaagtcatcgcccaacttggagctcgtcaccaagcaagtaacgtttcatttggtaccaaccaagctgtggaaaccaatcgtgactggggttctgctatgaaaccaatcaccgattatgcacctgccatagaatacggtgtttatgattccactgcaactatggttaatgatattccttataactatccgggaacaagcacacctgtctacaactgggatagagcatatttcggtaatattactctgcaatatgctcttcaacaatcacgaaatgtcacagccgttgagactttgaataaggtcggtctagatagagctaaaaccttccttaatggtcttggtatcgactatccaagcatgcattatgcaaacgccatttcaagtaatacaacagaatctaataaacaatacggagcaagtagtgaaaaaatggctgctgcttatgctgcctttgcaaatggtggcacttactataaaccaatgtatatccataaagtcgtcttcagtgatggaagtaaaaaagagttctctaatgtcggaactcgtgccatgaaggaaacgacagcctatatgatgaccgacatgatgaaaacagtcttgacttatggaactgggcgtggagcctatcttccttggcttcctcaagctggtaaaacaggaacctctaactatacagatgaggaagttgaaaaccacatcaagaacactggctatgtagctccagatgaaatgtttgttggttatactcgtaagtattctatggctgtatggacaggttattcgaatcgtttaactcctatcgttggagatggtttcctagttgcagctaaagtttatcgctcaatgataacgtatctatcagaagatactcatccagaagactggacgatgccagacggacttttcagaaacggggaatttgtattcaaaaatggagctcgcccaatatggactgaaccctctactcaacaatcctcaacagctgaaagttcaagctcatcatcagatagttcaacttcacagtctagctcaaccactccaagcacaaataatagtacgactaccaatcctaacaataatacgcaacaatcaaatacaacccctgatcaacaaaatcagaatcctcaaccagcacaaccataa

SEQ ID NO: 1170 - DNA, 20 bp, Artificial Sequence
  Synthetic DNA Sequence
acgaattggactacgcaatt

SEQ ID NO: 1171 - DNA, 20 bp, Artificial Sequence
  Synthetic DNA Sequence
acgaggatgatttgattgtc

SEQ ID NO: 1172 - DNA, 1560 bp, Streptococcus pneumoniae strain 64147
gatcctctaaatgattctcaggtggctgttattgcctctatttcaaaggagatgcctggcattagtatttctacttcttgggatagaaaggttttggaaacttccctttcttctatagttgggagtgtatccagtgaaaaagctggtctcccagcggaagaagcagaagcctatcttaaaaaaggctattctctaaatgaccgtgtaggaacctcctatttggaaaagcaatatgaagagaccttacaaggaaaacgctcggtaaaagaaatccatctggacaaatatggcaacatggaaagcgtggatacaattgaggaaggtagtaagggaaacaatatcaagctgaccattgatttggccttccaagatagcgtggatgctttgctgaaaagttatttcaattcagagttgggaaatggtggagccaagtattctgaaggtgtctatgcagtcgcccttaacccaaaaacaggtgctgttttgtctatgtcaggaattaaacatgacttgaaaacaggagagttgacgccggattccttgggaacggtaaccaatgtctttgtcccaggttcggttgtcaaagcagcgaccatcagctctggttgggaaaatggagtcttgtcaggaaatcagaccttgacagaccagtccattgtctttcaaggttcagctccaattaattcttggtatcctgccttttctagaccaatgccgattacggcggttcaggctctagagtattcatccaatgcttatatggtccaaacagccctaggtcttatggggcagacctatcaacccaatatgtttgtcggcaccagcaatctagagtctgctatggggaaattgcgttcaacctttggtgaatatggtttgggttctgcgaccggaattgacctaccagatgaatctactggatttgttcccaaagagtatagctttgctaatttcattaccaatgcctttgggcagtttgataactatacgccgatgcagttggctcagtatgtagcaactattgcaaatgatggtgttcgtgtggctcctcgtattgttgaaggcatttatggtaataatgataagggaggactgggtgacttgattcagcaactgcaaccgacagagatgaataaggtcaatatatccgactccgatatgagcatcttgcaccaaggtttttatcaggttgcccatggtactagtgaattgacaactggacgtgccttttcaaatggcgccttggtatccattagcggaaaaacaggtacagccgaaagctatgtggcagatggtcagcaagcaaccaataccaatgcggtggcctatgccccatctgataatccccaaatcgctgtagctgttgtcttccctcataacaccaaccttacaaatggtgtcggaccttccattgcgcgcgatattatcaacctctataaccaacatcatccaatgaattagaaaggaacatatgctttatccaacacctattgctaagctaattgacagttattcgaagttaccgggtatcgggattaagacggctacccgtttggcctt

SEQ ID NO: 1173 - DNA, 2007 bp, Streptococcus pneumoniae strain CS109
gagtcccgattgctgaggatgcaacctcctataatgtctatgcggtcattgatgagaactataagtcagcaacgggtaagattctttacgtagaaaaaacacaatttaacaaggttgcagaggtctttcataagtatctggacatggaagaatcctatgtaagagagcaactctcgcaacctaatctcaagcaagtttcctttggagcaaagggaaatgggattacctatgccaatatgatgactatcaaaaaagagttggaaactgcagaggtcaaggggattgattttacaaccagtcccaatcgtagttatccaaacggacaatttgcttctagttttatcggtctagctcagctccatgaaaatgaagatggcagcaagagcttgctgggaacttctggaatggagagttccttgaacagtattcttgcagggacagacggcattattacctatgaaaaggatcgtctgggcaatattgtacccggaacagaactggtatcgcaacaaactgtggatggcaaggatgtttatacaacattgtctagtccgctacaatctttcatggaaactcagatggatgcctttctagaaaaagtaaaaggtaagtatatgaccgcgaccttggtcagtgcaaagaccggtgaaattctcgctaccacccaacgacctacctttaatgcagatactaaagaaggaatcactgaggactttgtttggcgtgatattctttatcaaagtaactatgaaccaggatcagcctttaaggtcatgatgttagcttcttctattgataataataccttcccaagtggagaatacttcaatagcagtgaattcaaaatagcggatgcgacgactcgagattgggatgttaatgagggtttgactactggtgggatgatgactttctcacaaggtttcgctcactccagtaatgttggaacgagtctacttgaacaaaaaatgggagatgctacttggttggattatctaaaacgctttaaatttggggttccaactcgctttggcttgacagatgaatacgctggtcaacttccagctgataatattgttagtattgctcaaagctcatttgggcaaggaatttcagtgacacaaacacaaatgcttcgtgcctttacagctattgctaatgatggagttatgctggagccaaaatttataagtgctatttatgatactaacaatcagtctgtacgtaagtcacaaaaagaaatagtaggaaatcctgtttccaaagaggcagcaagcacaactcgaaatcacatgatcttagttgggacggaccctctatatggaactatgtataatcactacacaggaaagccaattataacagttcctggacaaaatgtagcagttaaatccggtacggctcaaatcgctgatgagaaaaatggaggatacttggttggttctaccaattatattttctcagttgtgactatgaatcctgctgaaaatcctgattttatcttgtatgtaacggttcaacagcctgagcattattcaggtatccagttgggagaatttgccaccccaatcttggagcgggcttcagctatgaaagaatctctcaatcttcaatctccagccaaaaatttagataaagttacgacagaatcttcttatgcaatgcctagcatcaaggatatttcacctggtgagttggcggaagccttacgccgaaatattgtgcaaccaatcgttgtaggtactggaacaaagattaaagagacttctgtagaagaagggaccaatcttgcaccaaaccaacaagttctccttttatcggataaggtagaagaaattccagacatgtatagctggaaaaaagagactgccgagacctttgctaaatggttggatattgaactggaatttgaaggttcaggttccgttgttcagaagcaagatgttcggactaatacagctatcaaaaacattaaaaaaattaaattaactttaggagactaatatg

SEQ ID NO: 1174 - DNA, 18 bp, Artificial Sequence
  Synthetic DNA Sequence
gaacgtggtgaagttcgc

SEQ ID NO: 1175 - DNA, 21 bp, Artificial Sequence
  Synthetic DNA Sequence
gttactggtgtagaaatgttc

SEQ ID NO: 1176 - DNA, 19 bp, Artificial Sequence
  Synthetic DNA Sequence
tactggtgtagaaatgttc

SEQ ID NO: 1177 - DNA, 20 bp, Artificial Sequence
  Synthetic DNA Sequence
gctcaacaagttccagatta

SEQ ID NO: 1178 - DNA, 2456 bp, Staphylococcus aureus NCTC 8325
atgaactgattatacttaacattaaaaaagatgataacaccttctacacctccatatcacaaaaaattataacattattttgacataaatactacatttgtaatatactacaaatgtagtcttatataaggaggatattgatgaaaaagataaaaattgttccacttattttaatagttgtagttgtcgggtttggtatatatttttatgcttcaaaagataaagaaattaataatactattgatgcaattgaagataaaaatttcaaacaagtttataaagatagcagttatatttctaaaagcgataatggtgaagtagaaatgactgaacgtccgataaaaatatataatagtttaggcgttaaagatataaacattcaggatcgtaaaataaaaaaagtatctaaaaataaaaaacgagtagatgctcaatataaaattaaaacaaactacggtaacattgatcgcaacgttcaatttaattttgttaaagaagatggtatgtggaagttagattgggatcatagcgtcattattccaggaatgcagaaagaccaaagcatacatattgaaaatttaaaatcagaacgtggtaaaattttagaccgaaacaatgtggaattggccaatacaggaacacatatgagattaggcatcgttccaaagaatgtatctaaaaaagattataaagcaatcgctaaagaactaagtatttctgaagactatatcaacaacaaatggatcaaaattgggtacaagatgataccttcgttccactttaaaaccgttaaaaaaatggatgaatatttaagtgatttcgcaaaaaaatttcatcttacaactaatgaaacagaaagtcgtaactatcctctagaaaaagcgacttcacatctattaggttatgttggtcccattaactctgaagaattaaaacaaaaagaatataaaggctataaagatgatgcagttattggtaaaaagggactcgaaaaactttacgataaaaagctccaacatgaagatggctatcgtgtcacaatcgttgacgataatagcaatacaatcgcacatacattaatagagaaaaagaaaaaagatggcaaagatattcaactaactattgatgctaaagttcaaaagagtatttataacaacatgaaaaatgattatggctcaggtactgctatccaccctcaaacaggtgaattattagcacttgtaagcacaccttcatatgacgtctatccatttatgtatggcatgagtaacgaagaatataataaattaaccgaagataaaaaagaacctctgctcaacaagttccagattacaacttcaccaggttcaactcaaaaaatattaacagcaatgattgggttaaataacaaaacattagacgataaaacaagttataaaatcgatggtaaaggttggcaaaaagataaatcttggggtggttacaacgttacaagatatgaagtggtaaatggtaatatcgacttaaaacaagcaatagaatcatcagataacattttctttgctagagtagcactcgaattaggcagtaagaaatttgaaaaaggcatgaaaaaactaggtgttggtgaagatataccaagtgattatccattttataatgctcaaatttcaaacaaaaatttagataatgaaatattattagctgattcaggttacggacaaggtgaaatactgattaacccagtacagatcctttcaatctatagcgcattagaaaataatggcaatattaacgcacctcacttattaaaagacacgaaaaacaaagtttggaagaaaaatattatttccaaagaaaatatcaatctattaaatgatggtatgcaacaagtcgtaaataaaacacataaagaagatatttatagatcttatgcaaacttaattggcaaatccggtactgcagaactcaaaatgaaacaaggagaaagtggcagacaaattgggtggtttatatcatatgataaagataatccaaacatgatgatggctattaatgttaaagatgtacaagataaaggaatggctagctacaatgccaaaatctcaggtaaagtgtatgatgagctatatgagaacggtaataaaaaatacgatatagatgaataacaaaacagtgaagcaatccgtaacgatggttgcttcactgttttattatgaattattaataagtgctgttacttctcccttaaatacaatttcttcattttcattgtatgttgaaagtgacactgtaacgagtccattttctttttttatggatttcttatttgtaatttcagcgataacgtacaatgtattacctggtatacagtttaataaatttaacgttattcatttgtgttcctgctacaacttcttctccgtatttaccttcttctacccataatttaaatgatattgaaagtgtatgcatgc

SEQ ID NO: 1179 - DNA, 20 bp, Artificial Sequence
  Synthetic DNA Sequence
atttggtgacgggtgacttt

SEQ ID NO: 1180 - DNA, 19 bp, Artificial Sequence
  Synthetic DNA Sequence
tccaccgttgccaatcgca

SEQ ID NO: 1181 - DNA, 20 bp, Artificial Sequence
  Synthetic DNA Sequence
agcagcttactagatgccgt

SEQ ID NO: 1182 - DNA, 20 bp, Artificial Sequence
  Synthetic DNA Sequence
aactgcaagagatcctttgg

SEQ ID NO: 1183 - DNA, 2535 bp, Streptococcus pneumoniae strain 175
atggcgatagaaaagctatcacccggcatgcaacagtatgtggatattaaaaagcaatatccagatgcttttttgctctttcggatgggtgatttttatgaattattttatgaggatgcggtcaatgctgcgcagattctggaaatttccttaacgagtcgcaacaagaatgccgacaatccgatccctatggcgggtgttccctatcattctgcccaacagtatatcgatgtcttgattgagcagggttataaggtggctatcgcagagcagatggaagatcctaaacaagcagttggggttgttaaacgagaggttgttcaggtcattacgccagggacagtggtcgatagcagtaagccggacagtcagaataattttttggtttccatagaccgcgaaggcaatcaatttggcctagcttatatggatttggtgacgggtgacttttatgtgacaggtcttttggatttcacgctggtttgtggggaaatccgtaacctcaaggctcgagaagtggtgttgggttatgacttgtctgaggaagaagaacaaatcctcagccgccagatgaatctggtactctcttatgaaaaagaaagctttgaagaccttcatttattggatttgcgattggcaacggtggagcaaacggcatctagtaagctgctccagtatgttcatcggactcagatgagggaattgaaccacctcaaacctgttatccgctacgaaattaaggatttcttgcagatggattatgcgaccaaggctagtctggatttggttgagaatgctcgctcaggtaagaaacaaggcagtcttttctggcttttggatgaaaccaaaacggctatggggatgcgtctcttgcgttcttggattcatcgccccttgattgataaggaacgaatcgtccaacgtcaagaagtagtgcaggtctttctcgaccatttctttgagcgtagtgacttgacagacagtctcaagggtgtttatgacattgagcgcttggctagtcgtgtttcttttggcaaaaccaatccaaaggatctcttgcagttggcgactaccttgtctagtgtgccacggattcgtgcgattttagaagggatggagcaacctactctagcctatctcatcgcacaactggatgcaatccctgagttggagagtttgattagcgcagcgattgctcctgaagctcctcatgtgattacagatgggggaattatccggactggatttgatgagactttagacaagtatcgttgcgttctcagagaagggactagctggattgctgagattgaggctaaggagcgagaaaactctggtatcagcacgctcaagattgactacaataaaaaggatggctactattttcatgtgaccaattcgcaactgggaaatgtgccagcccactttttccgcaaggcgacgctgaaaaactcagaacgctttggaaccgaagaattagcccgtatcgagggagatatgcttgaggcgcgtgagaagtcagccaacctcgaatacgaaatatttatgcgcattcgtgaagaggtcggcaagtacatccagcgtttacaagctctagcccaaggaattgcgacggttgatgtcttacagagtctggcggttgtggctgaaacccagcatttgattcgacctgagtttggtgacgattcacaaattgatatccggaaagggcgccatgctgtcgttgaaaaggttatgggggctcagacctatattccaaatacgattcagatggcagaagataccagtattcaattggttacagggccaaacatgagtgggaagtctacctatatgcgtcagttagccatgacggcggttatggcccagctgggttcctatgttcctgctgaaagcgcccatttaccgatttttgatgcgatttttacccgtatcggagcagcagatgacttggtttcgggtcagtcaacctttatggtggagatgatggaggccaataatgccatttcgcatgcgaccaagaactctctcattctctttgatgaattgggacgtggaactgcaacttatgacgggatggctcttgctcagtccatcatcgaatatatccatgagcacatcggagctaagaccctctttgcgacccactaccatgagttgactagtctggagtctagtttacaacacttggtcaatgtccacgtggcaactttggagcaggatgggcaggtcaccttccttcacaagattgaaccgggaccagctgataaatcctacggtatccatgttgccaagattgctggcttgccagcagaccttttagcaagggcggataagattttgactcagctagagaatcaaggaacagagagtcctcctcccatgagacaaactagtgctgtcactgaacagatttcactctttgatagggcagaagagcatcctatcctagcagaattagctaaactggatgtgtataatatgacacctatgcaggttatgaatgtcttagtagagttaaaacagaaactataa

SEQ ID NO: 1184 - DNA, 623 bp, Streptococcus pneumoniae strain StrR-05
tgacgggtgacttttatgtgacaggtcttttggatttcacgctggtttgtggggaaatccgtaacctcaaggctcgagaagtggtgttgggttatgacttgtctgaggaagaagaacaaatcctcagccgccagatgaatctggtactctcttatgaaaaagaaagctttgaagaccttcatttattggatttgcgattggcaacggtggagcaaacggcatctagtaagctgctccagtatgttcatcggactcagatgagggaattgaaccacctcaaacctgttatccgatacgaaattaaggatttcttgcagatggattatgcgaccaaggctagtctggatttggttgagaatgctcgctcaggtaagaaacaaggcagtcttttctggcttttggatgaaaccaaaacggctatggggatgcgtctcttgcgttcttggattcatcgccccttgattgataaggaacgaatcgtccaacgtcaagaagtagtgcaggtctttctcgaccatttctttgagcgtagtgacttgacagacagtctcaagggtgtttatgacattgagcgcttggctagtcgtgtttcttttggcaaaaccaatccaaaggatctcttg

SEQ ID NO: 1185 - DNA, 621 bp, Streptococcus pneumoniae strain StrR-06
tgacgggtgacttttatgtgacaggtcttttggatttcacgctggtttgtggggaaatccgtaacctcaaggctcgagaagtggtgttgggttatgacttgtctgaggaagaagaacaaatcctcagccgccagatgaatctggtactctcttatgaaaaagaaagctttgaagaccttcatttattggatttgcgattggcaacggtggagcaaacggcatctagtaagctgctccagtatgttcatcggactcagatgagggaattgaaccacctcaaacctgttatccgatacgaaattaaggatttcttgcagatggattatgcgaccaaggctagtctggatttggttgagaatgctcgctcaggtaagaaacaaggcagtcttttctggcttttggatgaaaccaaaacggctatggggatgcgtctcttgcgttcttggattcatcgccccttgattgataaggaacgaatcgtccaacgtcaagaagtagtgcaggtctttctcgaccatttctttgagcgtagtgacttgacagacagtctcaagggtgtttatgacattgagcgcttggctagtcgtgtttcttttggcaaaaccaatccaaaggatctct

SEQ ID NO: 1186 - DNA, 622 bp, Streptococcus pneumoniae strain StrR-11
tgacgggtgacttttatgtgacaggtcttttggatttcacgctggtttgtggggaaatccgtaacctcaaggctcgagaagtggtgttgggttatgacttgtctgaggaagaagaacaaatcctcagccgccagatgaatctggtactctcttatgaaaaagaaagctttgaagaccttcatttattggatttgcgattggcaacggtggagcaaacggcatctagtaagctgctccagtatgttcatcggactcagatgagggaattgaaccacctcaaacctgttatccgctacgaaattaaggatttcttgcagatggattatgcgaccaaggctagtctggatttggttgagaatgctcgctcaggtaagaaacaaggcagtcttttctggcttttggatgaaaccaaaacggctatggggatgcgtctcttgcgttcttggattcatcgccccttgattgataaggaacgaatcgtccaacgtcaagaagtagtgcaggtctttctcgaccatttctttgagcgtagtgacttgacagacagtctcaagggtgtttatgacattgagcgcttggctagtcgtgtttcttttggcaaaaccaatccaaaggatctctt

SEQ ID NO: 1187 - DNA, 622 bp, Streptococcus pneumoniae strain StrR-55
tgacgggtgacttttatgtgacaggtcttttggatttcacgctggtttgtggggaaatccgtaacctcaaggctcgagaagtggtgttgggttatgacttgtctgaggaagaagaacaaatcctcagccgccagatgaatctggtactctcttatgaaaaagaaagctttgaagaccttcatttattggatttgcgattggcaacggtggagcaaacggcatctagtaagctgctccggtatgttcatcggactcagatgagggaattgaaccacctcaaacctgttatccgctacgaaattaaggatttcttgcagatggattatgcgaccaaggctagtctggatttggttgagaatgctcgctcaggtaagaaacaaggcagtcttttctggcttttggatgaaaccaaaacggctatggggatgcgtctcttgcgttcttggattcatcgccccttgattgataaggaacgaatcgtccaacgtcaagaagtagtgcaggtctttctcgaccatttctttgagcgtagtgacttgacagacagtctcaagggtgtttatgacattgagcgcttggctagtcgtgtttcttttggcaaaaccaatccaaaggatctctt

SEQ ID NO: 1188 - DNA, 599 bp, Streptococcus oralis ATCC 35037
gggtgacttttatgtaacggggctattggatttcacgttggtttgtggggaaattcgcaatctcaaggctagagaagtggtgctgggttatgacttgtctgaggaagaagaacaaatcctcagtcgtcagatgaatctggtgctttcttatgagaaggaaggctttgaggaccttcatttactggatccacgactggcagctgtggagcaagcggcagctagtaagctcctccagtatgttcaccggacccagatgcgggaattgaaccacctcaaaccagttatccgctatgaaatcaaagatttcttacagatggactatgcgaccaaggctagtctggatttggttgagaatgcccgttcaggcaagaagcaaggcagtcttttctggcttttagatgaaaccaagacggctatgggaatgcgtctcttgcgttcttggattcatcgtcctttgattgataaggagcgaatcgtccagcgtcaagaggtggtgcaggtctttcttgaccacttctttgagcgtagtgatttaacggacagtcttaagggtgtttatgatatcgaacgcttggctagtcgggtttcttttggcaaga

SEQ ID NO: 1189 - DNA, 624 bp, Streptococcus mitis ATCC 49456
ggtgacgggtgacttttatgtgacaggtcttttggattttacgctggtttgtggggaaatccgcaatctcaaggctcgagaagtggtgctgggttatgacttgtctgaggaagaagaacagatccttagtcgtcagatgaatctggtactttcctatgaaaaagaaggctttgaagaccttcatttactggattcacgattggcagctgtggagcaagcggcatctagtaaactgcttcagtatgttcatcggactcagatgagggaattgaaccacctcaagcctgttatccgctatgaaatcaaagattttttgcagatggattatgcgaccaaggctagtctggatttggttgagaatgcccgttcaggcaagaagcaaggtagtcttttttggcttttggatgaaaccaaaacagctatgggaatgcgtctcttgcggtcttggattcatcgccccctgattgataaggaacgaattgtccaacgccaagaagttgtgcaggtctttctcgaccatttctttgagcgtagtgatttgacagacagtctcaagggtgtttatgacattgagcgcttggctagtcgtgtttcttttggcaaaaccaatccaaaggatctctt

SEQ ID NO: 1190 - DNA, 599 bp, Streptococcus mitis strain LSPQ 2583
tgacgggtgactttcaggtgactagtttagaggactttgtcttggtctgcggggaaatccgcaatttgaaagctagggaagtggtgctgggctatgccttgccagaagctgaggagcaggttttggctggacagatgaaccttttactgtcctatgtggagaaggttttggaggatgttcagctgctgggcgaggagctgtctcctatggagcgtcaggcagcagggaaactgctggagtatgtgcaccggacccagatgagggagctcagccatttgaagaaggctcagcattatgaaatcaaggacttcctgcaaatggactatgccaccaaggcgagtctggatttgacagaaaatgctcgctcgggcaagaagcacggcagtctttattggctgatggacgagactaagacggccatgggcggccgcatgctgcgctcttggatccagcgtccgctgattgatgaagcgcgaattagccagcgacagaatgtcgttgaggtttttctggatcatttctttgagcggagtgatttgacggagagcctcaagggggtctatgatatcgagcggctggctagtcgggtgtcttttggc

SEQ ID NO: 1191 - DNA, 622 bp, Streptococcus mitis ATCC 903
tgacgggtgactttcaggtgactagtttagaggactttgccctggtctgcggggaaatccgtaatttgaaggctagggaagtggtgctgggctatgctttgccagaagctgaggagcaggtcttggctggacagatgaatcttttgctgtcctatgtacagacggccttggacgatgtccagctgctgggcgaggaactgtctcctatggagcgtcaggcagcggggaaattgctagagtatgtgcaccggacccagatgagggagctcagccatttgaagaaggcccagcattatgaaatcaaggactttctgcaaatggattatgctaccaaggcgagtctggatttgacagaaaatgctcgctcgggtaagaaacacggcagtctttattggctgatggacgagaccaagacggccatgggcggccgtatgctgcgctcttggatccagcgtccgttgattgatgaagtgcgaattagccagcggcagaatgtcgtcgaggtttttctggaacatttctttgagcggagtgatttgacggagagcctcaagggagtctatgatatcgagcggctggctagtcgggtgtcttttggcaagaccaatccaaaggatctctt

SEQ ID NO: 1192 - DNA, 22 bp, Artificial Sequence
  Synthetic DNA Sequence
ggtaaaacaggaacctctaact

SEQ ID NO: 1193 - DNA, 22 bp, Artificial Sequence
  Synthetic DNA Sequence
ggtaagacaggtacttctaact

SEQ ID NO: 1194 - DNA, 24 bp, Artificial Sequence
  Synthetic DNA Sequence
catttcaagtaatacaacagaatc

SEQ ID NO: 1195 - DNA, 24 bp, Artificial Sequence
  Synthetic DNA Sequence
catttcaagtaacacaactgaatc

SEQ ID NO: 1196 - DNA, 24 bp, Artificial Sequence
  Synthetic DNA Sequence
gccatttcaagtaatacaacagaa

SEQ ID NO: 1197 - DNA, 25 bp, Artificial Sequence
  Synthetic DNA Sequence
caaacgccatttcaagtaatacaac

SEQ ID NO: 1198 - DNA, 381 bp, Staphylococcus saprophyticus ATCC 43867
aacgggcgtctcgatagaaaaacacgtgaaaatcccaatgattataaacaatcaatatacgattttgctgaagctgtaacaaaaggtattaaggaacaaacaaataaaaattaataggcaacttaaccagaatcgttaaaactatatgacgattctggttttttaaattcaaaaagttttctaaaaaatttacttgcttctttaaagtataggtatgaaatacaattgattaaaatagtaaaggaaatgaatcatgaaacaattaactaagcctttatacttttacctattactttttattacaacaacgctgattggcgcgttactattatatttgccaatcacakgtaaacatcctattgattttgtggacgcccgtta

SEQ ID NO: 1199 - DNA, 25 bp, Artificial Sequence
  Synthetic DNA Sequence
gtattaaagaagatatccaaaaagc

SEQ ID NO: 1200 - DNA, 25 bp, Artificial Sequence
  Synthetic DNA Sequence
tcaaagaagaaactaaaaaagctgt

SEQ ID NO: 1201 - DNA, 19 bp, Artificial Sequence
  Synthetic DNA Sequence
aacgtaggtgtccttcttc

SEQ ID NO: 1202 - DNA, 22 bp, Artificial Sequence
  Synthetic DNA Sequence
gtgttgaaatgttccgtaaaca

SEQ ID NO: 1203 - DNA, 21 bp, Artificial Sequence
  Synthetic DNA Sequence
  modified_base (3): i
  modified_base (9): i
  modified_base (12): i
ggngarmgnggnaaygaratg

SEQ ID NO: 1204 - DNA, 21 bp, Artificial Sequence
  Synthetic DNA Sequence
  modified_base (3): i
  modified_base (10): i
  modified_base (13): i
gcnaayaacntcnwmyatgcc

SEQ ID NO: 1205 - DNA, 20 bp, Artificial Sequence
  Synthetic DNA Sequence
  modified_base (6): i
  modified_base (9): i
  modified_base (18): i
aayacntcnawyatgccngt

SEQ ID NO: 1206 - DNA, 19 bp, Artificial Sequence
  Synthetic DNA Sequence
  modified_base (3): i
  modified_base (6): i
  modified_base (9): i
  modified_base (15): i
cknsrngtngartcngcca

SEQ ID NO: 1207 - DNA, 20 bp, Artificial Sequence
  Synthetic DNA Sequence
  modified_base (3): i
  modified_base (6): i
  modified_base (12): i
ccntcntcwccnggcatytc

SEQ ID NO: 1208 - DNA, 25 bp, Artificial Sequence
  Synthetic DNA Sequence
tcaaaaagttttctaaaaaatttac

SEQ ID NO: 1209 - DNA, 25 bp, Artificial Sequence
  Synthetic DNA Sequence
acgggcgtccacaaaatcaatagga

SEQ ID NO: 1210 - DNA, 22 bp, Artificial Sequence
  Synthetic DNA Sequence
accagcttgcccaatacaaagg

SEQ ID NO: 1211 - DNA, 24 bp, Artificial Sequence
  Synthetic DNA Sequence
attcttgtaacaggctttgatccc

SEQ ID NO: 1212 - DNA, 23 bp, Artificial Sequence
  Synthetic DNA Sequence
  modified_base (3): i
  modified_base (6): i
  modified_base (9): i
  modified_base (12): i
  modified_base (15): i
  modified_base (18): i
ccnccnrgnggnganacngcwcc

SEQ ID NO: 1213 - DNA, 26 bp, Artificial Sequence
  Synthetic DNA Sequence
  modified_base (6): i
  modified_base (9): i
  modified_base (12): i
  modified_base (15): i
  modified_base (18): i
  modified_base (24): i
aarggnggnacngcngcnathccngg

SEQ ID NO: 1214 - DNA, 23 bp, Artificial Sequence
  Synthetic DNA Sequence
ggtaaaacaggtacctctaacta

SEQ ID NO: 1215 - DNA, 1337 bp, Streptococcus pyogenes strain D471
aacaaaataaaagaacttacctattttccatccaaaatgtttagcaatcatcatctgcaaggcaacgtattgcatggcattgatgtgatgagcaactaatatgtcattagaacgttgcgtcaaactagcatctaaataaagatcgaaatgcagttatcaaaaatgcaagctcctatcggcccttgttttaattattactcacattgccttaatgtatttacttgcttattattaacttttttgctaagttagtagcgtcagttattcattgaaaggacattattatgaaaattcttgtaacaggctttgatccctttggcggcgaagctattaatcctgcccttgaagctatcaagaaattgccagcaaccattcatggagcagaaatcaaatgtattgaagttccaacggtttttcaaaaatctgccgatgtgctccagcagcatatcgaaagctttcaacctgatgcagtcctttgtattgggcaagctggtggccggactggactaacgccagaacgcgttgccattaatcaagacgatgctcgcattcctgataacgaagggaatcagcctattgatacacctattcgtgcagatggtaaagcagcttatttttcaaccttgccaatcaaagcgatggttgctgccattcatcaggctgggcttcctgcttctgtttctaatacagctggtacctttgtttgcaatcatttgatgtatcaagccctttacttagtggataaatattgtccaaatgccaaagctgggtttatgcatattccctttatgatggaacaggttgttgataaacctaatacagctgccatgaacctcgatgatattacaagaggaattgaggctgctatttttgccattgtcgatttcaaagatcgttccgatttaaaacgtgtagggggcgctactcactgactgtgacgctactaaacctattttaaaaaaacagagatatgaactaactctgttttttttgtgctaaaaatgaaagacctagggaaacttttcatcggtctttctcaattgtcatcttaatctaatactacttctaacatcagcgggtatagtttgccagtaattaagaaacgttgttgatctaaatgagcaatcccattcaaaacattaaggtcagggtaatgggacttatcaagatttaaggcttttaacaaaggactaatatcataggtggctaccacctttccagaatcaggttggagtttgacaatagtattggtttgccaaatattggcatagagataaccatctacatactctaattcgttaagcattgagatagggacactttctatagcaactagt

SEQ ID NO: 1216 - DNA, 23 bp, Artificial Sequence
  Synthetic DNA Sequence
ggtaagactggtacatcaaacta

SEQ ID NO: 1217 - DNA, 25 bp, Artificial Sequence
  Synthetic DNA Sequence
caaatgccatttcaagtaacacaac

SEQ ID NO: 1218 - DNA, 25 bp, Artificial Sequence
  Synthetic DNA Sequence
caaacgccatttcaagtaacacaac

SEQ ID NO: 1219 - DNA, 25 bp, Artificial Sequence
  Synthetic DNA Sequence
caaatgctatttcaagtaatacaac

SEQ ID NO: 1220 - DNA, 25 bp, Artificial Sequence
  Synthetic DNA Sequence
caaacgccatttcaagtaatacgac

SEQ ID NO: 1221 - DNA, 23 bp, Artificial Sequence
  Synthetic DNA Sequence
  modified_base (6): i
  modified_base (9): i
  modified_base (12): i
  modified_base (18): i
gayacnccnggncaygtngaytt

SEQ ID NO: 1222 - DNA, 26 bp, Artificial Sequence
  Synthetic DNA Sequence
  modified_base (9): i
  modified_base (12): i
  modified_base (15): i
  modified_base (21): i
atygayacnccnggncaygtngaytt

SEQ ID NO: 1223 - DNA, 26 bp, Artificial Sequence
  Synthetic DNA Sequence
  modified_base (3): i
  modified_base (6): i
  modified_base (12): i
  modified_base (24): i
ayntcnarrtgnarytcrcccatncc

SEQ ID NO: 1224 - DNA, 24 bp, Artificial Sequence
  Synthetic DNA Sequence
  modified_base (3): i
  modified_base (6): i
  modified_base (9): i
  modified_base (12): i
  modified_base (18): i
  modified_base (21): i
ccngynhtnytngarccnatnatg

SEQ ID NO: 1225 - DNA, 26 bp, Artificial Sequence
  Synthetic DNA Sequence
  modified_base (3): i
  modified_base (15): i
  modified_base (18): i
  modified_base (21): i
  modified_base (24): i
tanccraacatytcnsmnarnggnac

SEQ ID NO: 1226 - DNA, 20 bp, Artificial Sequence
  Synthetic DNA Sequence
  modified_base (3): i
  modified_base (9): i
gtnrmrtanccraacatytc

SEQ ID NO: 1227 - DNA, 26 bp, Artificial Sequence
  Synthetic DNA Sequence
  modified_base (3): i
  modified_base (6): i
  modified_base (9): i
  modified_base (12): i
  modified_base (24): i
gtnccnytnkcngaratgttyggnta

SEQ ID NO: 1228 - DNA, 29 bp, Artificial Sequence
  Synthetic DNA Sequence
  modified_base (3): i
  modified_base (6): i
  modified_base (9): i
  modified_base (12): i
  modified_base (24): i
gtnccnytnkcngaratgttyggntaygc

SEQ ID NO: 1229 - DNA, 26 bp, Artificial Sequence
  Synthetic DNA Sequence
  modified_base (9): i
  modified_base (12): i
  modified_base (15): i
  modified_base (18): i
  modified_base (21): i
tccatytgngcngcnccngtnatcat

SEQ ID NO: 1230 - DNA, 2145 bp, Escherichia coli
tgaacgcctaaaagataaacgaggaaacaaatggctcgtacaacacccatcgcacgctaccgtaacatcggtatcagtgcgcacatcgacgccggtaaaaccactactaccgaacgtattctgttctacaccggtgtaaaccataaaatcggtgaagttcatgacggcgctgcaaccatggactggatggagcaggagcaggaacgtggtattaccatcacttccgctgcgactactgcattctggtctggtatggctaagcagtatgagccgcatcgcatcaacatcatcgacaccccggggcacgttgacttcacaatcgaagtagaacgttccatgcgtgttctcgatggtgcggtaatggtttactgcgcagttggtggtgttcagccgcagtctgaaaccgtatggcgtcaggcaaacaaatataaagttccgcgcattgcgttcgttaacaaaatggaccgcatgggtgcgaacttcctgaaagttgttaaccagatcaaaacccgtctgggcgcgaacccggttccgctgcagctggcgattggtgctgaagaacatttcaccggtgttgttgacctggtgaaaatgaaagctatcaactggaacgacgctgaccagggcgtaaccttcgaatacgaagatatcccggcagacatggttgaactggctaacgaatggcaccagaacctgatcgaatccgcagctgaagcttctgaagagctgatggaaaaatacctgggtggtgaagaactgactgaagcagaaatcaaaggtgctctgcgtcagcgcgttctgaacaacgaaatcatcctggtaacctgtggttctgcgttcaagaacaaaggtgttcaggcgatgctggatgcggtaattgattacctgccatccccggttgacgtacctgcgatcaacggtatcctggacgacggtaaagacactccggctgaacgtcacgcaagtgatgacgagccgttctctgcactggcgttcaaaatcgctaccgacccgtttgttggtaacctgaccttcttccgtgtttactccggtgtggttaactctggtgataccgtactgaactccgtgaaagctgcacgtgagcgtttcggtcgtatcgttcagatgcacgctaacaaacgtgaagagatcaaagaagttcgcgcgggcgacatcgctgctgctatcggtctgaaagacgtaaccactggtgacaccctgtgtgacccggatgcgccgatcattctggaacgtatggaattccctgagccggtaatctccatcgcagttgaaccgaaaaccaaagctgaccaggaaaaaatgggtctggctctgggccgtctggctaaagaagacccgtctttccgtgtatggactgacgaagaatctaaccagaccatcatcgcgggtatgggcgaactgcacctcgacatcatcgttgaccgtatgaagcgtgaattcaacgttgaagcgaacgtaggtaaaccgcaggttgcttaccgtgaaactatccgccagaaagttaccgatgttgaaggtaaacacgcgaaacagtctggtggtcgtggtcagtatggtcatgttgttatcgacatgtacccgctggagccgggttcaaacccgaaaggctacgagttcatcaacgacattaaaggtggtgtaatccctggcgaatacatcccggccgttgataaaggtatccaggaacagctgaaagcaggtccgctggcaggctacccggtagtagacatgggtattcgtctgcacttcggttcttaccatgacgttgactcctctgaactggcgtttaaactggctgcttctatcgcctttaaagaaggctttaagaaagcgaaaccagttctgcttgagccgatcatgaaggttgaagtagaaactccggaagagaacaccggtgacgttatcggtgacttgagccgtcgtcgtggtatgctcaaaggtcaggaatctgaagttactggcgttaagatccacgctgaagtaccgctgtctgaaatgttcggatacgcaactcagctgcgttctctgaccaaaggtcgtgcatcatacactatggaattcctgaagtatgatgaagcgccgagtaacgttgctcaggccgtaattgaagcccgtggtaaataa

SEQ ID NO: 1231 - DNA, 37 bp, Artificial Sequence
  Synthetic DNA Sequence
gcgagcccgaagataaaaaagaacctctgctgctcgc

SEQ ID NO: 1232 - DNA, 42 bp, Artificial Sequence
  Synthetic DNA Sequence
ggagccgcgcgattttataaatgaatgttgataaccggctcc

SEQ ID NO: 1233 - DNA, 35 bp, Artificial Sequence
  Synthetic DNA Sequence
gcgagcgttactggtgtagaaatgttccggctcgc

SEQ ID NO: 1234 - DNA, 20 bp, Artificial Sequence
  Synthetic DNA Sequence
actaaataaacgctcattcg

SEQ ID NO: 1235 - DNA, 38 bp, Artificial Sequence
  Synthetic DNA Sequence
gcgagccgaagttgaagttgttggtattgctggctcgc

SEQ ID NO: 1236 - DNA, 34 bp, Artificial Sequence
  Synthetic DNA Sequence
gcgagccgtggtgaagttcgcgttggtggctcgc

SEQ ID NO: 1237 - DNA, 38 bp, Artificial Sequence
  Synthetic DNA Sequence
gcgagccgcgaaatcgaagttgctgtattagggctcgc

SEQ ID NO: 1238 - DNA, 38 bp, Artificial Sequence
  Synthetic DNA Sequence
gcgagcggcgttaattttggcaccgaagaagagctcgc

SEQ ID NO: 1239 - DNA, 33 bp, Artificial Sequence
  Synthetic DNA Sequence
gcgagcgcagacctttcagcagaggaggctcgc

SEQ ID NO: 1240 - DNA, 38 bp, Artificial Sequence
  Synthetic DNA Sequence
gcgagccggcaagacaatatgacagcaaaatcgctcgc

SEQ ID NO: 1241 - DNA, 35 bp, Artificial Sequence
  Synthetic DNA Sequence
gcgagcggggaacgaggatgatttgattggctcgc

SEQ ID NO: 1242 - DNA, 600 bp, Enterococcus faecium strain BM4147-1
ttcttagagacattgaatatgccttatgtcggcgcaggcgtattgaccagtgcatgtgccatggataaaatcatgaccaagtatattttacaagctgctggtgtgccgcaagttccttatgtaccagtacttaagaatcaatggaaagaaaatcctaaaaaagtatttgatcaatgtgaaggttctttgctttatccgatgtttgtcaaacctgcgaatatgggttctagtgtcggcattacaaaggcagaaaaccgagaagagctgcaaaatgctttagcaacagcctatcagtatgattctcgagcaatcgttgaacaaggaattgaagcgcgcgaaatcgaagttgctgtattaggaaatgaagatgttcggacgactttgcctggcgaagtcgtaaaagacgtagcattctatgattatgaagccaaatatatcaataataaaatcgaaatgcagattccagccgaagtgccggaagaagtttatcaaaaagcgcaagagtacgcgaagttagcttacacgatgttaggtggaagcggattgagccggtgcgatttctttttgacaaataaaaatgaattattcctgaatgaatta

SEQ ID NO: 1243 - DNA, 2275 bp, Enterococcus faecalis
ggtaccaaagaaaaaaacgaacgccacaaccaacagcctctaaagcaacacctgcttctgaaattgagggagatttagcaaatgtcaatgagattcttttggttcacgatgatcgtgtcgggtcagcaacgatgggaatgaaagtcttagaagaaattttagataaagagaaaatttcaatgccgattcgaaaaattaatattaatgaattaactcaacaaacacaggctttaattgtcacaaaagctgaactaacggaacaagcacgtaaaaaagcaccgaaagcgacacacttatcagtaaaaagttatggttaatccccaaaaatatgaaacagtgggtttcgctcttaaaagaaagtgcctagagaggaagaaaacaatggaaaatcttacgaatatttcaattgaattaaatcaacagtttaatacaaaagaagaagctattcgcttttccggccagaaactagtcgaggcaggctgtgttgagcccgcttatatcgaagcaatgattgaaagagaccaattgctatctgcccatatggggaattttattgccattcctcatggaacagaagaagccaaaaaattagtgaaaaaatcaggaatctgtgtagtgcaagtcccagagggcgttaattttggcaccgaagaagatgaaaaaattgctaccgtattatttgggattgccggagtcggtgaagaacatttgcaattagtccaacaaattgcactttattgtagtgatatggataacgtggtgcaacttgccgatgcattaagtaaagaagaaataacagaaaatttagccattgcttaaaggagagaataagaatgaacgcagtacattttggagcaggaaatattggacgcggctttattggcgaaattttagctaaaacgggtttcatattaccgtttgtggatgttaatggaaaccatcatcaagcgttaaaagaacgtaaaagttatacaattgaattggccgatgcctcacatcaacaaattaacgttgaaaatgtgaccgggttaaataacatgacagaaccagaaaaagtagtagaagcaattgcggaagccgatttagtcacgacggcaattggtcctaatattttaccaagaattgctgaattaattgctcaaggaattgatgcacgtgccgaagcaaattgtcaaaacggcccgctggatattatcgcttgtgaaaatatgattggtggttcaacctttttagcagaagaagtggccataatatttgaaaaacccagcttatctgaacaatggattggttttcctgatgcggcagttgatcggattgttccattacaaaaacataaagatccactttttgttcaagttgagcctttttgtgaatgggtcattgatgataccaaccgaaaagccaaagagattcagttagaaggcgtcattacttgtcgattagagccgtatattgaacgaaaattatttagtgtaaccagtggccatgctacagttgcctatacaggggcgttgttaggctatcaaaccattgacgaagcgatgcaggacgccttagtggtagcgcaactcaaatcagttttgcaggaaaccggtaaacttttagtggccaaatggaattttgatgaacaagaacatgcagcctatattgaaaaaattatcaaccgtttccaaaataaatatatttcagatgctattacacgtgtagcacggacaccaatcagaaaattaggtgcgcaagaacggtttattcgaccaatccgtgaattacaggaacgcaatctagtgtcggccgcatttatagcaatgattggtattgtctttaattatcatgatccagaagatgaacaaagccgtcaattacaggaaatgcttgaccaagaaagtgttgatacagtggatcgctgaagtaacgggcattgaagatccagaaacggttaaaaatattaaacaaaacgtagaactgctatgcgcgaccacaagtagcataattaacaaaatccttctaccaagatacttcacatttcttaattaaagaaaaaacaaccgcgcctcacctgagccgacccccaaaagttagacctagaaatctaacttttggaggtttttttgtatggcaaaatacagttttgaaatttaaacttaaacttgttcatgactacttatatggtcaaggaggtctaaggtttctcgcaaagaagtatgggtttaaagatagtctcaaataagcaaatggataaatgcctataaagaacttggtgaagaaggggggatcc

SEQ ID NO: 1244 - DNA, 442 bp, Staphylococcus aureus subsp. aureus ATCC 25923
gatcaatctttgtcggtacacgatattcttcacgactaaataaacgctcattcgcgattttataaatgaatgttgataacaatgttgtattatctactgaaatctcattacgttgcatcggaaacattgtgttctgtatgtaaaagccgtcttgataatctttagtagtaccgaagctggtcatacgagagttatattttccagccaaaacgatatttttataatcattacgtgaaaaaggtttcccttcattatcacacaaatattttagcttttcagtttctatatcaactgtagcttctttatccatacgttgaataattgtacgattctgacgcaccatcttttgcacacctttaatgttatttgttttaaaagcatgaataagtttttcaacacaacgatgtgaatcttctaagaagtcaccgtaaaatgaaggatc

SEQ ID NO: 1245 - DNA, 845 bp, Bacillus anthracis strain CIP 9444
gatggcggaaagctaccagaaatctacaacgcccttacggtaaaacagagcaacgaaaacggaacaagcattaacttaacatttgaagttgcacttcatttaggtgatgacacagttcgtacagttgcaatgtcttccacagatggacttgttcgtggcacagaagtagaagatactggtaaagcaatctctgtaccagttggtgatgcaacacttggtcgtgtatttaacgtattaggtgatgcaattgacttagatggtgaggttcctgcggatgtacgtcgtgatccaattcaccgtcaagcacctgcattcgaagaattatctactaaagtagaaattcttgaaactggtattaaagtagtagacttacttgctccttacattaagggtggtaagatcggtctattcggtggtgccggtgtaggtaaaacggtattaattcaggaattaatcaataacatcgcacaagaacacggtggtatctctgtattcgctggtgtaggtgagcgtactcgtgagggtaatgacttataccacgaaatgagcgattctggcgtaattaagaaaactgcgatggtattcggacaaatgaacgagccacctggagcacgtcaacgtgttgcgttaacaggtttaacaatggctgagcatttccgtgatgagcaaggacaagatgtacttctgttcatcgataatatcttccgtttcacgcaagcaggttctgaagtatctgcccttcttggccgtatgccatctgcggtaggttaccaaccaacacttgcaacagaaatgggtcaattacaagagcgtattacatctacaaataaagggtctatcacgtc

SEQ ID NO: 1246 - DNA, 656 bp, Bacillus mycoides ATCC 11986
tgcacttcatttaggtgatgacacagttcgtacagttgcaatgtcttccacagatggacttgttcgtggcacagaagtagaagatactggtaaagcaatctctgtaccagttggtgatgtaacacttggtcgtgtatttaacgtattaggtgatgcaattgacttagatggtgatgttcctgcggatgtacgtcgtgatccaattcaccgtcaagcgcctgcattcgaagagttatctactaaagtagaaattcttgaaactggtattaaagtagtagacttacttgctccttacattaagggtggtaagattggtctattcggtggtgccggcgtaggtaaaacagtattaattcaggaattaattaataacatcgcacaagagcacggtggtatctctgtattcgctggtgtaggtgagcgtactcgtgaaggtaacgacttataccacgaaatgagcgattctggcgtaattaagaaaactgcgatggtattcggacaaatgaacgagccacctggagcacgtcaacgtgttgcattaacaggtttaacaatggctgaacatttccgtgatgagcaaggacaagacgtactattgttcatcgataacatcttccgtttcacgcaagcgggttctgaagtatctgcccttcttg

SEQ ID NO: 1247 - DNA, 791 bp, Bacillus thuringiensis ATCC 10792
cgaaaacggaagtattaacttaacatttgaagttgcacttcatttaggtgatgatacagttcgtacagttgcgatgtcttccacagatggacttgttcgtggcacagaagtagaagatactggtaaaccaatctctgtaccagttggtgatgtaacacttggtcgcgtatttaacgtattaggtgatgcaattgacttagatggtgaggttcctgcagatgtacatcgtgatccaattcaccgtcaagcacctgcattcgaagaattatctactaaagtagaaattcttgaaactggtattaaagtagtagacttacttgctccttacattaagggtggtaagatcggcctattcggtggtgccggcgtaggtaaaacagtattaattcaggaattaattaacaacatcgcacaagagcacggtggtatctctgtattcgctggtgtaggtgagcgtactcgtgagggtaatgacttataccacgaaatgagcgattctggcgtaatcaagaaaactgcgatggtattcggacaaatgaacgagccacctggagcacgtcaacgtgttgcattaacaggtttaacaatggctgagcatttccgtgatgagcaaggacaagacgtacttctgttcatcgataacatcttccgtttcacgcaagcgggttctgaagtatctgcccttcttggtcgtatgccatctgcggtaggttaccaaccaacacttgcaacagaaatgggtcaattacaagagcgtattacatctacaaataaagggtctatcacgtcta

SEQ ID NO: 1248 - DNA, 825 bp, Bacillus thuringiensis strain BGSC 4AC1
atctacaatgcccttacggtaaaacaaagcaacgaaaacggaagcatgaacttaacatttgaagttgcacttcatttaggtgatgatacagttcgtacagttgcgatgtcttccacagatggacttgttcgtggcacagaagtagaagatactggtaaagcaatctctgtaccagttggtgatgcaacacttggacgtgtattcaacgtattaggtgatgcaattgacttagatggtgaacttcctgcggatgtacaccgtgatccaattcaccgtcaagcacctgcattcgaagaattatctactaaagtagaaattcttgaaactggtattaaagtagtagacttacttgctccttacattaagggtggtaagatcggcctattcggtggtgccggcgtaggtaaaacagtattaattcaggagttaatcaataacatcgcacaagagcacggtggtatctctgtattcgctggtgtaggtgagcgtactcgtgagggtaatgacttataccacgaaatgagcgattctggcgtaatcaagaaaactgcgatggtattcggacaaatgaacgagccacctggagcacgtcaacgtgttgcattaacaggtttaacaatggctgagcatttccgtgatgagcaaggacaagacgtacttctgttcatcgataacatcttccgtttcacgcaagcgggttctgaagtatctgcccttcttggtcgtatgccatctgcggtaggttaccaaccaacacttgcaacagaaatgggtcaattacaagagcgtattacatctacaaataaagggtctatcacgtctatc

SEQ ID NO: 1249 - DNA, 775 bp, Bacillus thuringiensis strain HER 1236
atctacaacgcccttacggtaaaacaaagcaacgaaaacggaagtattaacttaacatttgaagttgcacttcatttaggtgatgatacagttcgtacagttgcgatgtcttccacagatggacttgttcgtggcacagaagtagaagatactggtaaaccaatctctgtaccagttggtgatgtaacacttggtcgcgtatttaacgtattaggtgatgcaattgacttagatggtgaggttcctgcagatgtacatcgtgatccaattcaccgtcaagcacctgcattcgaagaattatctactaaagtagaaattcttgaaactggtattaaagtagtagacttacttgctccttacattaagggtggtaagatcggcctattcggtggtgccggcgtaggtaaaacagtattaattcaggaattaattaacaacatcgcacaagagcacggtggtatctctgtattcgctggtgtaggtgagcgtactcgtgagggtaatgacttataccacgaaatgagcgattctggcgtaatcaagaaaactgcgatggtattcggacaaatgaacgagccacctggagcacgtcaacgtgttgcattaacaggtttaacaatggctgagcatttccgtgatgagcaaggacaagacgtacttctgttcatcgataacatcttccgtttcacgcaagcgggttctgaagtatctgcccttcttggtcgtatgccatctgcggtaggttaccaaccaacacttgcaacagaaatgggtc

SEQ ID NO: 1250 - DNA, 832 bp, Bacillus weihenstephanensis strain WSBC 10204
ccagcaatctacaacgcccttacggtaaaacaaagcaacgaaaacggagcgagcatcaacttaacatttgaagttgcacttcatttaggtgatgacacagttcgtacagttgcgatgtcttccacagatggacttgttcgtggcacagaagtagaagatactggtaaagcaatctctgtaccagttggtgatgtaacacttggtcgcgtattcaacgtattaggtgatgcaattgacttagatggtgatgttcctgcggatgtacgtcgtgatccaattcaccgtcaagcacctgcattcgaagaactatctacaagaatagaaattcttgaaactggtattaaagtagtagatttacttgctccttacattaagggtggtaagatcggtctattcggtggtgccggtgtaggtaaaacggtattaattcaggaattaattaacaacatcgcacaagagcacggtggtatctctgtattcgctggtgtaggtgagcgtactcgtgagggtaatgacttataccacgaaatgagcgattctggcgtaattaagaaaactgcgatggtatttggacaaatgaacgagccacctggagcacgtcaacgtgttgcattaacaggtttaacaatggctgaacatttccgtgatgagcaaggacaagacgtactattgttcatcgataacatcttccgtttcacgcaagcaggttctgaagtatctgcccttcttggtcgtatgccatctgcggtaggttaccaaccaacacttgcaacagaaatgggtcaattacaagagcgtattacatctacaaataaagggtctatcacgtcta

SEQ ID NO: 1251 - DNA, 802 bp, Bacillus thuringiensis strain HER 1418
aaatctacaacgcccttacggtaaaacaaagcaacgaaaacggaagtattaacttaacatttgaagttgcacttcatttaggtgatgatacagttcgtacagttgcgatgtcttccacagatggacttgttcgtggcacagaagtagaagatactggtaaaccaatctctgtaccagttggtgatgtaacacttggtcgcgtatttaacgtattaggtgatgcaattgacttagatggtgaggttcctgcagatgtacatcgtgatccaattcaccgtcaagcacctgcattcgaagaattatctactaaagtagaaattcttgaaactggtattaaagtagtagacttacttgctccttacattaagggtggtaagatcggcctattcggtggtgccggcgtaggtaaaacagtattaattcaggaattaattaacaacatcgcacaagagcacggtggtatctctgtattcgctggtgtaggtgagcgtactcgtgagggtaatgacttataccacgaaatgagcgattctggcgtaatcaagaaaactgcgatggtattcggacaaatgaacgagccacctggagcacgtcaacgtgttgcattaacaggtttaacaatggctgagcatttccgtgatgagcaaggacaagacgtacttctgttcatcgataacatcttccgtttcacgcaagcgggttctgaagtatctgcccttcttggtcgtatgccatctgcggtaggttaccaaccaacacttgcaacagaaatgggtcaattacaagagcgtattacatctac

SEQ ID NO: 1252 - DNA, 823 bp, Bacillus thuringiensis strain HER 1410
aaatctacaacgcccttacggtaaaacaaagcaacgaaaacggaagtattaacttaacatttgaagttgcacttcatttaggtgatgatacagttcgtacagttgcaatgtcttccacagatggacttgttcgtggcacagaagtagaagatactggtaaaccaatctctgtaccagttggtgatgtaacacttggtcgcgtatttaacgtattaggtgatgcaattgacttagatggtgaggttcctgcagatgtacatcgtgatccaattcaccgtcaagcacctgcattcgaagaattatctactaaagtagaaattcttgaaactggtattaaagtagtagacttacttgctccttacattaagggtggtaagatcggcctattcggtggtgccggcgtaggtaaaacagtattaattcaggaattaattaacaacatcgcacaagagcacggtggtatctctgtattcgctggtgtaggtgagcgtactcgtgagggtaatgacttataccacgaaatgagcgattctggcgtaatcaagaaaactgcgatggtattcggacaaatgaacgagccacctggagcacgtcaacgtgttgcattaacaggcttaacaatggctgagcatttccgtgatgagcaaggacaagacgtacttctgttcatcgataacatcttccgtttcacgcaagcgggttctgaagtatctgcccttcttggtcgtatgccatctgcggtaggttaccaaccaacacttgcaacagaaatgggtcaattacaagagcgtattacatctacaaataaagggtctatcacgtc

SEQ ID NO: 1253 - DNA, 798 bp, Bacillus cereus ATCC 13472
ccagaaatctacaatgcccttacggtaaaacaaagcaacgaaaacggaagcatgaacttaacatttgaagttgcacttcatttaggtgatgatacagttcgtacagttgcgatgtcttccacagatggacttgttcgtggcacagaagtagaagatactggtaaagcaatctctgtaccagttggtgatgcaacacttggacgtgtattcaacgtattaggtgatgcaattgacttagatggtgaacttcctgcggatgtacaccgtgatccaattcaccgtcaagcacctgcattcgaagaattatctactaaagtagaaattcttgaaactggtattaaagtagtagacttacttgctccttacattaagggtggtaagatcggcctattcggtggtgccggcgtaggtaaaacagtattaattcaggaattaatcaataacatcgcacaagagcatggtggtatctctgtattcgctggtgtaggtgagcgtactcgtgagggtaatgacttataccacgaaatgagcgattctggcgtaatcaagaaaactgcgatggtattcggacaaatgaacgagccacctggagcacgtcaacgtgttgcattaacaggtttaacaatggctgagcatttccgtgatgagcaaggacaagacgtacttctgttcatcgataacatcttccgtttcacgcaagcgggttctgaagtatctgcccttcttggtcgtatgccatctgcggtaggttaccaaccgacacttgcaacagaaatgggtcaattacaagagcgtatt

SEQ ID NO: 1254 - DNA, 767 bp, Bacillus cereus ATCC 7064
catttgaagttgcacttcatttaggtgatgacacagttcgtacagttgcaatgtcttccacagatggacttgttcgtggcacagaagtagaagatactggtaaagcaatctctgtaccagttggtgatgcaacacttggtcgtgtatttaacgtattaggtgatgcaattgacttagatggtgaggttcctgcggatgtacgtcgtgatccaattcaccgtcaagcacctgcattcgaagaattatctactaaagtagaaattcttgaaactggtattaaagtagtagacttacttgctccttacattaagggtggtaagatcggtctattcggtggtgccggtgtaggtaaaacggtattaattcaggaattaatcaataacatcgcacaagaacacggtggtatctctgtattcgctggtgtaggtgagcgtactcgtgagggtaatgacttataccacgaaatgagcgattctggcgtaattaagaaaactgcgatggtattcggacaaatgaacgagccacctggagcacgtcaacgtgttgcgttaacaggtttaacaatggctgagcatttccgtgatgagcaaggacaagacgtacttctgttcatcgataatatcttccgtttcacgcaagcaggttctgaagtatctgcccttcttggccgtatgccatctgcggtaggttaccaaccaacacttgcaacagaaatgggtcaattacaagagcgtattacatctacaaataaagggtctatcacgtct

SEQ ID NO: 1255 - DNA, 1174 bp, Staphylococcus aureus strain C-14
  misc_feature (1)...(1174): n=a,t,c or g
gaaatgcgtgaatcatttttagattatgcgatgagtgttatcgttgctcgtgcattgccagatgttcgtgacggtttaaaaccagtacatcgtcgtatactatatggattaaatgaacaaggtatgacaccggataaatcatataaaaaatcagcacgtatcgttggtgacgtaatgggtaaatatcaccctcatggtgacttatctatttatgaagcaatggtacgtatggctcaagatttcagttatcgttatccgcttgttgatggccaaggtaactttggttcaatggatggagatggcgcagcagcaatgcgttatactgaagcgcgtatgactaaaatcacacttgaactgttacgtgatattaataaagatacaatagattttatcgataactatgatggtaatgaaagagagccgtcagtcttacctgctcgattccctaacttattagccaatggtgcatcaggtatcgcggtaggtatggcaacgaatattccaccacataacttaacagaattaatcaatggtgtacttagcttaagtaagaaccctgatatttcaattgctgagttaatggaggatattgaaggtcctgatttcccaactgctggacttattttaggtaagagtggtattagacgtgcatatgaaacaggtcgtggttcaattcaaatgcgttctcgtgcagttattgaagaacgtggagncggacgtcaacgtattgttgtcactgaaattcctttccaagtgaataaggctcgtatgattgaaaaaattgcagagctcgttcgtgacaagaaaattgacggtatcactgatttacgtgatgaaacaagtttacgtactggtgtgcgtgtcgttattgatgtgcgtaaggatgcaaatgctagtgtcattttaaataacttatacaaacaaacacctcttcaaacatcatttggtgtgaatatgattgcacttgtaaatggtagaccgaagcttattaatttaaaagaagcgttggtacattatttagagcatcaaaagacagttgttagaagacgtacgcaatacaacttacgtaaagctaaagatcgtgcccacattttagaaggattacgtatcgcacttgaccatatcgatgaaattatttcaacgattcgtgagtcagatacagataaagttgcaa

SEQ ID NO: 1256 - DNA, 780 bp, Bacillus weihenstephanensis strain WSBC 10209
atctacaacgcccttacggtaaaacaaagcaacgaaaacggagcaagcattaacttaacatttgaagttgcacttcatttaggtgatgacacagttcgtacagttgcaatgtcttccacagatggacttgttcgtggcacagaagtagaagatactggtaaagcaatctctgtaccagttggtgatgtaacacttggtcgtgtatttaacgtattaggtgatgcaattgacttagatggagatgttcctgcggatgtacgtcgtgatccaattcaccgtcaagcgcctgcattcgaagagttatctactaaagtagaaattcttgaaactggtattaaagtagtagacttacttgctccttacattaagggtggtaagatcggtctattcggtggtgccggtgtaggtaaaacagtattaattcaggaattaattaacaacatcgcacaagagcacggtggtatctctgtattcgctggtgtaggtgagcgtactcgtgaaggtaacgacttataccacgaaatgagcgattctggcgtaattaagaaaactgcgatggtattcggacaaatgaacgagccacctggagcacgtcaacgtgttgcattaacaggtttaacaatggctgaacatttccgtgatgagcaagggcaagacgtactattgttcatcgataacatcttccgtttcacgcaagcgggttctgaagtatctgcccttcttggtcgtatgccatctgcggtaggttaccagccaacacttgcaacagaaatgggtcaa

SEQ ID NO: 1257 - DNA, 817 bp, Bacillus anthracis strain CIP 7700
ctaccagaaatctacaacgcccttacggtaaaacagagcaacgaaaacggaacaagcattaacttaacatttgaagttgcacttcatttaggtgatgacacagttcgtacagttgcaatgtcttccacagatggacttgttcgtggcacagaagtagaagatactggtaaagcaatctctgtaccagttggtgatgcaacacttggtcgtgtatttaacgtattaggtgatgcaattgacttagatggtgaggttcctgcggatgtacgtcgtgatccaattcaccgtcaagcacctgcattcgaagaattatctactaaagtagaaattcttgaaactggtattaaagtagtagacttacttgctccttacattaagggtggtaagatcggtctattcggtggtgccggtgtaggtaaaacggtattaattcaggaattaatcaataacatcgcacaagaacacggtggtatctctgtattcgctggtgtaggtgagcgtactcgtgagggtaatgacttataccacgaaatgagcgattctggcgtaattaagaaaactgcgatggtattcggacaaatgaacgagccacctggagcacgtcaacgtgttgcgttaacaggtttaacaatggctgagcatttccgtgatgagcaaggacaagatgtacttctgttcatcgataatatcttccgtttcacgcaagcaggttctgaagtatctgcccttcttggccgtatgccatctgcggtaggttaccaaccaacacttgcaacagaaatgggtcaattacaagagcgtattacatctacaaata

SEQ ID NO: 1258 - DNA, 829 bp, Bacillus thuringiensis strain HER 1404
ccagaaatctacaacgcccttacggtaaaacaaagcaacgaaaacggaagtattaacttaacatttgaagttgcacttcatttaggtgatgatacagttcgtacagttgcgatgtcttccacagatggacttgttcgtggcacagaagtagaagatactggtaaaccaatctctgtaccagttggtgatgtaacacttggtcgcgtatttaacgtattaggtgatgcaattgacttagatggtgaggttcctgcagatgtacatcgtgatccaattcaccgtcaagcacctgcattcgaagaattatctactaaagtagaaattcttgaaactggtattaaagtagtagacttacttgctccttacattaagggtggtaagatcggcctattcggtggtgccggcgtaggtaaaacagtattaattcaggaattaattaacaacatcgcacaagagcacggtggtatctctgtattcgctggtgtaggtgagcgtactcgtgagggtaatgacttataccacgaaatgagcgattctggcgtaatcaagaaaactgcgatggtattcggacaaatgaacgagccacctggagcacgtcaacgtgttgcattaacaggtttaacaatggctgagcatttccgtgatgagcaaggacaagacgtacttctgttcatcgataacatcttccgtttcacgcaagcgggttctgaagtatctgcccttcttggtcgtatgccatctgcggtaggttaccaaccaacacttgcaacagaaatgggtcaattacaagagcgtattacatctacaaataaagggtctatcacgtcta

SEQ ID NO: 1259 - DNA, 844 bp, Bacillus cereus ATCC 15816
tggcggaaagctaccagaaatctacaacgcccttacggtaaaacagagcaacgaaaacggtgaacttaacttaacatttgaagttgcacttcatttaggtgatgatacagttcgtacagttgcgatgtcttccacagatggacttgttcgtggcacagaagtagaagatactggtaaagcaatctctgtaccagttggtgatgcaacacttggtcgcgtatttaacgtattaggtgatgctattgacttagatggtgaggttcctgcggatgtacgtcgtgatccaattcaccgtcaagcacctgcattcgaagaattatctactaaagtagaaattcttgaaactggtattaaagtagtagacttacttgctccttacattaagggtggtaagatcggcctattcggtggtgccggtgtaggtaaaacagtattaattcaggagttaatcaacaacatcgcacaagagcacggtggtatctctgtattcgctggtgtaggtgagcgtactcgtgagggtaatgacttataccacgaaatgagcgattctggcgtaattaagaaaactgcgatggtattcggacaaatgaacgagccacctggagcacgtcaacgtgttgcattaacaggcttaacaatggctgaatatttccgtgatgagcaaggacaagacgtacttctgttcatcgataatatcttccgtttcacgcaagcaggttctgaagtatctgcccttcttggccgtatgccatctgcggtaggttaccaaccaacacttgcaacagaaatgggtcaattacaagagcgtattacatctacaaataaagggtctatcacgtctatc

SEQ ID NO: 1260 - DNA, 840 bp, Bacillus cereus ATCC 49064
aagctaccagaaatctacaacgcccttacggtaaaacagagcaacgaaaacggaacaagcattaacttaacatttgaagttgcacttcatttaggtgatgacacagttcgtacagttgcaatgtcttccacagatggacttgttcgtggcacagaagtagaagatactggtaaagcaatctctgtaccagttggtgatgcaacacttggtcgtgtatttaacgtattaggtgatgcaattgacttagatggtgaggttcctgcggatgtacgccgtgatccaattcaccgtcaagcacctgcattcgaagaattatctactaaagtagaaattcttgaaactggtattaaagtagtagacttacttgctccttacattaagggtggtaagatcggtctattcggtggtgccggtgtaggtaaaacagtattaattcaggaattaatcaacaacatcgcacaagaacacggtggtatctctgtattcgctggtgtaggtgagcgtactcgtgagggtaatgacttataccacgaaatgagcgattcaggcgtaattaagaaaactgcgatggtattcggacaaatgaacgagccacctggagcgcgtcaacgtgttgcgttaacaggtttaacaatggctgagcatttccgtgatgagcaaggacaagacgttcttctgttcatcgataatatcttccgtttcacgcaagcaggttctgaagtatctgcccttcttggtcgtatgccatctgcggtaggttaccaaccaacacttgcaacagaaatgggtcaattacaagagcgtattacatctacaaataaagggtctatcacgtctatc

SEQ ID NO: 1261 - DNA, 839 bp, Bacillus thuringiensis strain BGSC 4AZ1
gcggaaagctaccagaaatctacaatgcccttacggtaaaacaaagcaacgaaaacggaagcatgaacttaacatttgaagttgcacttcatttaggtgatgatacagttcgtacagttgcgatgtcttccacagatggacttgttcgtggcacagaagtagaagatactggtaaagcaatctctgtaccagttggtgatgcaacacttggacgtgtattcaacgtattaggtgatgcaattgacttagatggtgaacttcctgcggatgtacaccgtgatccaattcaccgtcaagcacctgcattcgaagaattatctactaaagtagaaattcttgaaactggtattaaagtagtagacttacttgctccttacattaagggtggtaagatcggcctattcggtggtgccggcgtaggtaaaacagtattaattcaggagttaatcaataacatcgcacaagagcacggtggtatctctgtattcgctggtgtaggtgagcgtactcgtgagggtaatgacttataccacgaaatgagcgattctggcgtaatcaagaaaactgcgatggtattcggacaaatgaacgagccacctggagcacgtcaacgtgttgcattaacaggtttaacaatggctgagcatttccgtgatgagcaaggacaagacgtacttctgttcatcgataacatcttccgtttcacgcaagcgggttctgaagtatctgcccttcttggtcgtatgccatctgcggtaggttaccaaccaacacttgcaacagaaatgggtcaattacaagagcgtattacatctacaaataaagggtctatcacgtct

SEQ ID NO: 1262 - DNA, 833 bp, Bacillus thuringiensis strain BGSC 4H2
aagctaccagaaatctacaatgcccttacggtaaaacaaagcaacgaaaacggaagcatgaacttaacatttgaagttgcacttcatttaggtgatgatacagttcgtacagttgcgatgtcttccacagatggacttgttcgtggcacagaagtagaagatactggtaaagcaatctctgtaccagttggtgatgcaacacttggacgtgtattcaacgtattaggtgatgcaattgacttagatggtgaacttcctgcggatgtacaccgtgatccaattcaccgtcaagcacctgcattcgaagaattatctactaaagtagaaattcttgaaactggtattaaagtagtagacttacttgctccttacattaagggtggtaagatcggcctattcggtggtgccggcgtaggtaaaacagtattaattcaggaattaatcaataacatcgcacaagagcacggtggtatctctgtattcgctggtgtaggtgagcgtactcgtgagggtaatgacttataccacgaaatgagcgattctggcgtaatcaagaaaactgcgatggtattcggacaaatgaacgagccacctggagcacgtcaacgtgttgcattaacaggtttaacaatggctgagcatttccgtgatgagcaaggacaagacgtacttctgttcatcgataacatcttccgtttcacgcaagcgggttctgaagtatctgcccttcttggtcgtatgccatctgcggtaggttaccaaccaacacttgcaacagaaatgggtcaattacaagagcgtattacatctacaaataaagggtctatcacgtc

SEQ ID NO: 1263 - DNA, 790 bp, Bacillus thuringiensis strain BGSC 4Q1
cgaaaacggaagcatgaacttaacatttgaagttgcacttcatttaggtgatgatacagttcgtacagttgcgatgtcttccacagatggacttgttcgtggcacagaagtagaagatactggtaaagcaatttctgtaccagttggtgatgtaacacttggacgtgtattcaacgtattaggtgatgcaattgacttagatggtgaacttcctgcggatgtacaccgtgatccaattcaccgtcaagcacctgcattcgaagaattatctactaaagtagaaattcttgaaactggtattaaagtagtagacttacttgctccttacattaagggtggtaagatcggcctattcggtggtgccggtgtaggtaaaacagtattaattcaggaattaattaacaacatcgcacaagagcacggtggtatctctgtattcgctggtgtaggtgagcgtactcgtgagggtaatgacttataccacgaaatgagcgattctggcgtaatcaagaaaactgcgatggtattcggacaaatgaacgagccacctggagcacgtcaacgtgttgcattaacaggtttaacaatggctgagcatttccgtgatgagcaaggacaagacgtacttctgttcatcgataacatcttccgtttcacgcaagcgggttctgaagtatctgcccttcttggtcgtatgccatctgcggtaggttaccaaccaacacttgcaacagaaatgggtcaattacaagagcgtattacatctacaaataaagggtctatcacgtct

SEQ ID NO: 1264 - DNA, 644 bp, Bacillus thuringiensis strain HER 1232
agttgcacttcatttaggtgatgatacagttcgtacagttgcgatgtcttccacagatggacttgttcgtggcacagaagtagaagatactggtaaaccaatctctgtaccagttggtgatgtaacacttggtcgcgtatttaacgtattaggtgatgcaattgacttagatggtgaggttcctgcagatgtacatcgtgatccaattcaccgtcaagcacctgcattcgaagaattatctactaaagtagaaattcttgaaactggtattaaagtagtagacttacttgctccttacattaagggtggtaagatcggcctattcggtggtgccggcgtaggtaaaacagtattaattcaggaattaattaacaacatcgcacaagagcacggtggtatctctgtattcgctggtgtaggtgagcgtactcgtgagggtaatgacttataccacgaaatgagcgattctggcgtaatcaagaaaactgcgatggtattcggacaaatgaacgagccacctggagcacgtcaacgtgttgcattaacaggtttaacaatggctgagcatttccgtgatgagcaaggacaagacgtacttctgttcatcgataacatcttccgtttcacgcaagcgggttctgaag

SEQ ID NO: 1265 - DNA, 823 bp, Bacillus anthracis ATCC 4229
ggcggaaagctaccagaaatctacaacgcccttacggtaaaacagagcaacgaaaacggaacaagcattaacttaacatttgaagttgcacttcatttaggtgatgacacagttcgtacagttgcaatgtcttccacagatggacttgttcgtggcacagaagtagaagatactggtaaagcaatctctgtaccagttggtgatgcaacacttggtcgtgtatttaacgtattaggtgatgcaattgacttagatggtgaggttcctgcggatgtacgtcgtgatccaattcaccgtcaagcacctgcattcgaagaattatctactaaagtagaaattcttgaaactggtattaaagtagtagacttacttgctccttacattaagggtggtaagatcggtctattcggtggtgccggtgtaggtaaaacggtattaattcaggaattaatcaataacatcgcacaagaacacggtggtatctctgtattcgctggtgtaggtgagcgtactcgtgagggtaatgacttataccacgaaatgagcgattctggcgtaattaagaaaactgcgatggtattcggacaaatgaacgagccacctggagcacgtcaacgtgttgcgttaacaggtttaacaatggctgagcatttccgtgatgagcaaggacaagatgtacttctgttcatcgataatatcttccgtttcacgcaagcaggttctgaagtatctgcccttcttggccgtatgccatctgcggtaggttaccaaccaacacttgcaacagaaatgggtcaattacaagagcgtattacatctacaa

SEQ ID NO: 1266 - DNA, 715 bp, Paracoccidioides brasiliensis ATCC 200443
tggtccgagrcccgattcmatgaaattatcaaggaaacctccaayttcattaagaaggtcggatataaccccaagactgttcctttcgttcccatttctggtttccagggtgacaacatgatcgatscctctgccaactgcccatggtacaagggctggtacmakgagactgccgacaggcaagyactctggcaagacccttcttgaggccattgacgscattgagccccccamscgtcctwccgataaacctctccgtcttcctctccaggatgtctacaagatctccggtattggmactgttcctgtcggacgtrttgagactggagtcatcaagcccggtatggtcgtgaccttcgctcccgccaacgtcaccactgaagtcaagtccgttgaaatgcaccaccagcagctttccgacggtawccccggtgacaacgtcggcttcaacgtcaagaatgtttccgtcaaagaagtccgccgtggtaacgttgcctggtgactctaagaatgatcccgcmawgggctgcgattccttcaatgcycaggtcatcgtcctcaaccaccctggtcaggttggcgctggttatgccccagtcctcgaytgccatactgcccacattgcytgcaarttcgctgagmtcmakgagaagattgaycgccgaaccggmaagtctgttgagaacgcccccaagttcatcaagtccggtgatgc

SEQ ID NO: 1267 - DNA, 875 bp, Blastomyces dermatitidis ATCC 56220
gagtcctcttatttacttttgtcatgactaccttactaatctgtcatagatcgttacaacgaaatcgtcaaggagacttccaacttcatcaagaaggtcggatacaaccccaagaacgttcctttcgttcctatctccggtttcaacggcgacaacatgcttgagccctcccccaactgcccctggtacaagggttgggagaaggagaccaaggccggtaaggtcactggtaagaccctcctcgaggccatcgacgccattgagccccctacccgtcccgccaacaaggtcagtactacctcaattacttgaactctcttcatacgttccgattactgactgcttcacagcccctccgtcttcccctccaggacgtttacaagatcggtggtattggaacggtgcccgtcggtcgtgttgagaccggtaccatctcccctggtatggtcgttaccttgtatgtatcctgaccatcccccttggcaatcattacgtactaactcactcttcagcgctcccgccaacgtcaccactgaagtcaagagtgttgaaatgcaccaccagcagctcgctgccggtcagcccggtgacaacgttggtttcaacgtgaagaacgtctccgtcaaggaaatccgtcgtggtaacgttgctggtgatagcaagaacgacccccctgccggtgctgcttccttcaacgcccaggtcatcgtcctcaaccaccccggtcaggtcggtgctggttacgccccagtccttgactgccacactgcccacattgcttgcaagttctctgaactccttgagaagattgaccgtcgtaccggaaagtctgttgaggaccaccccaagttcatcaagtccggtgacgctgccat

SEQ ID NO: 1268 - DNA, 1124 bp, Histoplasma capsulatum strain WSA-377
gtgagcgtggtatcaccatcgatattgccctctggaaattcgagaccccgaagtacagtgtcactgtcattggtgagtgctttttacccctcttaagcagatttcaacttccagagtatctactctaacatatccgcttagatgctcccggccatcgtgacttcatcaagaacatgatcactggtacctcccaggctgactgcgctatcctcatcattgctgccggtactggtgagttcgaggctggtatctccaaggatggccagactcgtgagcacgctctgcttgctttcacccttggtgtgaggcaactcatcgttgccatcaacaagatggacaccaccaagtggtccgagtcccgtttcaacgaaatcatcaaggaggtttccaacttcatcaagaaggtcggatataaccccaaggctgttcccttcgtgccaatctctggtttcgagggtgacaacatgattgaaccctcccccaactgcacctggtacaagggctggaacaaggagactgcctctggcaagtcttctggtaaaacccttctcgatgccattgacgccattgaacccccaacccgtcctaccgataagcctctccgtcttcccctccaggatgtttacaaaatctctggtattggcactgttcccgtcggacgtgttgagactggtgtcatcaagcccggtatggtcgtgactttcgctccctccaacgtcaccactgaagtcaagtccgtcgagatgcaccaccaacaactccaggctggttaccctggtgacaacgtcggcttcaacgtcaagaacgtttcagtcaaggaagtccgccgtggcaacgttgctggcgactccaaaaatgatccccccaagggctgcgaatccttcaatgcccaggtcatcgtccttaaccaccccggccaggttggcgctggttatgccccagtcctcgactgccacactgcccacattgcttgcaagttctctgaactcattgagaagatcgaccgccgtactggaaagtctgttgagaacaaccccaagttcatcaagtctggtgatgctgctatcgtcaagatggttccctccaagcccatgtgcgtggagcccttcactgactatccccct

SEQ ID NO: 1269 - DNA, 1043 bp, Trichophyton rubrum strain WSA-224
  misc_feature (1)...(1043): n=a,t,c or g
gtgagcgtggtatcaccatcgatatcgccctctggaagttcgagacccccaagtacaatgtcaccgtcattggtatgtttctttgccttgttccctcatgtggttgtaccatatctaacgagagtagacgcccccggtcaccgtgacttcatcaagaacatgatcactggtacctcccaggctgactgcgctattctcatcattgctgccggtactggtgagttcgaggctggtatctccaaggatggccagacccgtgagcacgctctgctcgccttcaccctcggtgtcaagcagctcatcgttgccatcaacaagatggacaccaccggctggtccgaggatcgtttcaaggaaattatcaaggaagtcaccaacttcatcaagaaggttggctacgaccccaagggtgttccattcgttccaatctctggtttcaacggtgacaacatgattgaggcctccaccaactgcccatggtacaagggatggaacaaggagaccaaggccggtggtgccaagtccggcaagaccctcctcgaggccatcgatgccatcgacatgccaacccgtcctaccgacaagcccctccgtctcccactccaggatgtctacaagatctctggtatcggaactgtgccagtcggtcgtgttgagaccggtatcatcaagcccggtatggtcgtcaccttngcccccgccaacgtcaccactgaagtcaagtccgtykaaatgcaccaccagcagcttcagcagggtgtccccggtgacaacgtcggcttcaatgtcaagaacgtttccgtcaaggaagtccgccgtggtaacgttgccggtgactccaagaacgacccaccatccggctgtgcctccttcaacgcccaggtcatygtcctcaaccaccccggccagatcggtgctggttacgstccagtcctcgactgccacactgstcacattgcttgcaagttcgctgagctcctcgagaagattgaccgccgtaccggtaaatccgtcgaagccaaccccaagttcgtcaagtctgg

SEQ ID NO: 1270 - DNA, 1105 bp, Microsporum canis strain WSA-217
gctgagcgtgagcgtggtatcaccattgatatcgccctctggaagttcgagacccccaagtacatggtcaccgtcatcggtatgctttatctgtttcccatttatagttgcgaccagtaactaacaaaaagtagatgcccccgggcaccgtgacttcatcaagaacatgattactggtacctcccaggccgactgcgctattctcatcattgctgccggtactggtgagttcgaggctggtatctccaaggatggccagactcgtgagcacgccctgctcgctttcaccctcggtgtcaagcagctcatcgttgccatcaacaagatggacaccaccaactggtctgagtcccgtttcggtgaaatcatcaaggaagtcaccaacttcatcaagaaggtcggctacgaccccaagggtgtcccattcgtcccaatctctggcttcaacggtgacaacatgattgagccctccaccaactgcccatggtacaagggatggaacaaggagaccaaggccggtggcaaatcctctggtaagaccctccttgaggccatcgatgccattgacatgcccactcgtcccaccgacaagcctctccgtctcccactccaggatgtctacaagatctctggtatcggaacagtaccagtcggtcgtgttgagactggtatcatcaagcctggtatggttgtcactttygcccccgccaacgtcaccactgaagtcaagtccgtcgaaatgcaccaccagcagctygtccagggtgttcccggtgacaacgttggcttcaacgtcaagaacgtytctgtcaaggaagtccgccgtggtaacgttgccggtgattccaagaacgacccaccagctggctgcgcctctttcaaggcccaggtcatcgtcctcaaccaccccggccagatcggtgctggttacgccccagtccttgactgccacactgcccacattgcttgcaagttctctgagcttcttgagaagattgaccgccgtactggtaaatccgtcgaaaccagccctaagttcgtcaagtctggtgatgccgctattgccaccatggttccatccaagcccatgtgcgttgaggctttc

SEQ ID NO: 1271 - DNA, 1244 bp, Aspergillus versicolor strain WSA-175
gagcgtgagcgtggtatcaccatcgatatcgctctctggaagttccagacccctaagtatgaggtcaccgtcattggtatgttgtccttcttgtgttaccatcgaaacatatctaacctacaactgcagacgcccccggtcaccgtgacttcatcaagaacatgatcactggtacctcccaggccgactgcgctattctcatcattgcttccggtactggtgaattcgaggctggtatctccaaggatggccagacccgtgagcacgctctgctcgctttcaccctcggtgtccgtcagctcatcgttgccctcaacaagatggacactgctggctgggctgaggctcgttacaacgaaatcgtcaaggaaacttccggtttcatcaagaaggtcggctacaaccccaagtcggttcccttcgtccccatctccggtttcaacggtgacaacatgcttgagccctcctccaactgcccctggtacaagggttgggagaaggagaccaaggctggtaaggccactggtaagaccctcctcgaggccatcgacgccattgagcctcccgtccgtccctccaacaagcctctccgtcttcccctccaggatgtctacaagatctctggtattggaactgtccccgtcggccgtgtcgagaccggtaccatcgtccccggtatggtcgtcaccttcgctcccgccaacgtcaccactgaagtcaagtccgttgagatgcaccaccagcagctcaaggagggtgttcccggtkacaacgttggtttcaacgtgaagaacgtttccgtcaaggaagtccgccgtggtaacgtcgctggtgactccaagaacgacccccctgccggtgctgcctctttcaccgcccaggtcatcgtcctcaaccaccccggtcaggtcggcgctggttacgctcccgtcctcgactgccacaccgctcacattgcctgcaagttcgctgagctccaggagaagatcgaccgccgtaccggaaagtctgtcgaatytgcccccaagttcatcaagtctggtgacgccgctatcgtcaagatgattccctccaagcccatgtgtgtcgagtctttcactgactaccctcctytcggccgtttcgccgtccgtgacgtaagttctttccccagcttttcgatgctacccttctmtgaatcacgtgtcatgtcttggcacccgcccatcacatgaccacgcaaccctataccccgccacaccctt

SEQ ID NO: 1272 - DNA, 1032 bp, Exophiala moniliae strain WSA-219
gctgagcgtgagcgtggtatcaccatcgatatcgctctctggaagttcgagacccccaagtactatgtcaccgtcatcgacgcccccggtcatcgtgacttcatcaagaacatgatcactggtacttcccaagctgactgcgccattctcatcattgctgccggtactggtgaattcgaagccggtatctccaaggatggtcagacccgtgagcacgctctgcttgcctacaccctgggtgtcaagcagctcattgtcgccatcaacaagatggacactaccaagtggtctgaggaccgtttcaacgaaatcatcaaggagacttccagcttcatcaagaaggtcggctacaaccccaagtccgttcctttcgtccccatctccggcttcaacggtgacaacatgatcgacgtctccaccaactgcccctggtacaagggctgggagaaggagaccaaggctggcaaggcctctggcaagactctccttgaggccatcgacgccattgaccccccctctcgtcccaccgacaagcctytccgtctccctctccaggatgtgtacaagatctctggtatcggaacggtgcccgtcggtcgtgtcgagactggtatcatcaaggccggtatggtcgttaccttcgctcctgccaacgtcaccactgaagtcaagtccgtcgaaatgcaccacgaacagctcgccgagggtgttccaggtgacaacgtcggtttcaacgtcaagaacgtytccgtcaaggaggttcgtcgtggaaacgtttgcggtgactccaagaacgacccacccaagggcgctgattccttcaacgcccaggtcatcgtcttgaaccaccctggtcaagttggtgctggctacgccccagtgttggattgccacactgcccacattgcttgcaagttctctgagcttctcgagaagatcgatcgtcgkaccggaaagtcgatcgaaaacaaccccaagttcatcaagtctggtgacgctgccatcgtcaagatggttcccagcaagcccatg

SEQ ID NO: 1273 - DNA, 1106 bp, Hortaea werneckii ATCC 34944
taacagcccgtgcgaccgtctcgtccaataactaatgattcgcaggtactatgtcgtgagtatccggtccttttttgttaatttaccagaaatgacgaaatttttgactaattaacacactcagaccgtcattgacgccccgggtcaccgtgacttcatcaagaacatgatcactggtacctcccaggccgactgcgctgtcctcatcattgctgccggtactggtgagttcgaggctggtatctccaaggatggccagacccgtgagcacgccctgctcgcctacaccctcggtgtcaagcagctcatcgtcgccatcaataagatggacaccaccaagtggtccgaggagcgttacggcgagatcatcaaggagacctctgccttcatcaagaaggtcggtttcaacccgaagcacgtcccgttcgtcccgatctccggtttcaacggtgacaacatgatcgaggcctycaccaactgcccgtggtacaagggctgggagaaggagaccaaggccaaggtcaccggcaagaccctycttgaggccattgacaacatcgacccgccgagccgtccttccgacaagccgctccgtcttcccctccaggatgtctacaagatcggtggtattgggacagtcccagtcggccgtgtcgagaccggtaccatcaaggccggcatggtcgttaccttcgctccggctggtgtcaccactgaagtgaagtccgttgaratgcaccacgagcagctcgctgagggtytgccgggtgacaacgtcggcttcaacgtcaagaacgtttccgtcaaggagatccgtcgtggcaacgttgctggtgacagcaaggctgacccgccgaagggctgcgacagcttcaacgcccaggtcatcgtcctgaaccaccctggccaggtcggtgctggttacgctccagtcctggactgccacactgcccacattgcctgcaagttcggcgagctcctcgagaagatcgaccgtcgctytggcaagtccattgaagcctygcctaagtacatcaagtctggtgacgctgccatygtcaagatgattccgtccaagccgatgtgcgttgagccattcactgagt

SEQ ID NO: 1274 - DNA, 1119 bp, Fusarium solani ATCC 32793
ctcaaggccgagcgtgagcgtggtatcaccatcgacattgccctctggaagttcgagactccccgctactatgtcaccgtcattggtatgttgctgtcacctctctcacacatgtctcaccactaacaatcaacagacgcccccggccaccgtgatttcatcaagaacatgatcactggtacttcccaggccgactgcgccattctcatcattgccgccggtactggtgagttcgaggctggtatctccaaggatggccagacccgtgagcacgccctgctcgcctacaccctcggtgtcaagaacctcattgtcgccatcaacaagatggacaccaccaagtggtccgagtcccgttaccaggagatcatcaaggagacctccaacttcatcaagaaggtcggctacaaccccaaggctgtcgctttcgtccccatctccggtttcaacggcgacaacatgcttactccctccaccaactgcccctggtacaagggctgggagcgtgagatcaagtccggcaagctcactggcaagaccctcctcgaggccattgactccatcgagccccccaagcgtcccgtcgacaagcccctycgacttcccctccaggatgtctacaagatcggtggtattggcacggttcccgtcggccgtatcgagactggtgtcatcaagcccggtatggtcgttaccttmgccccctccaacgtcaccactgaagtcaagtccgtcgaratgcaccacgagcagctctytgagggtcttcccggtgacaacgtcggcttcaacgtgaagaacgtytccgtcaaggagatccgacgtggcaacgtcgctggtgactccaagaacgacccccctytgggtgccgcctctttcaccgcccaggtcattgtcctcaaccaccctggccaggtcggtgccggttacgcccccgttytggactgccacactgcccacattgcctgcaagttcgccgagatccaggagaagatcgaccgccgaactggtaaggctgttgagtccgcccccaagttcatcaagtctggtgactccgccatcgtcaagatggttccctccaagcccatgtgcgttgaggctttcactgactacccccct

SEQ ID NO: 1275 - DNA, 1113 bp, Aureobasidium pullulans strain WSA-234
ctgaagtctgagcgtgagcgtggtatcactatcgatatcgccctctggaagttcgagacccccaagtacatggtcaccgtcatcgatgcccccggtcaccgtgatttcatcaagaacatgatcactggtacctcccaggctgactgcgccattctcatcattgctgccggtactggtgagttcgaggctggtatctccaaggatggccagactcgtgagcacgctctcctcgcctacacccttggtgtcaagcagctcatcgttgccatcaacaagatggacaccaccaagtggtctgaggcccgttaccaggagatcatcaaggagacctccggtttcatcaagaaggtcggctacaaccccaagcacgttcccttcgtccccatctccggcttcaacggagacaacatgatcgaggtcagctccaactgcccttggtacaagggttgggagaaggagaccaaggccaaggccactggcaagaccctcctcgaggccattgacgccatcgaccctccttcccgtcctaccgacaagcccctccgtcttcccctccaggatgtctacaagatcggtggtattggcacggtgcccgtcggtcgtgttgagaccggtaagatcatgggtggtatggttgtcaccttcgcccccgctggtgtcaccaccgaggtcaagtccgtcgagatgcaccacgagcagctcaccgagggtcttcccggtgacaacgtcggcttcaacgtcaagaacgtytccgtcaaggagatccgtcgtggcaacgttgccggtgactccaagaacgacccccccaagggttgtgactccttcaacgcccaggtcatcgtcctgaaccaccctggtcaggtcggtgctggttacgcacccgtcctcgactgccacactgcccacattgcttgcaagttytccgagcttgttgagaagattgaccgcagaaccggcaagtccgttgaggctgcccccaagttcatcaagtctggtgacgccgccatcgtcaagatggttccctccaagcccatgtgtgttgaggctttcaccgactaccctcctytcggtcgtttcgccgtccggtatgtttttcttcttcaatcattcttc

SEQ ID NO: 1276 - DNA, 731 bp, Blastomyces dermatitidis ATCC 14112
ggtctgagacccgtttcaacgaaattatcaaggaagtcagcaacttcatcaagaaggtcggatacaaccccaagtctgttcccttcgtgccaatctccggtttcgagggtgacaacatgattgagccttcccccaactgcccttggtacaagggctggaacaaggagactgctgctggcaaggccgccggtaagactcttctcgatgccattgacgccatcgacccccccgtccgtcctaccgagaagcctctccgtcttcccctccaggatgtgtacaagatctccggtattggcactgttcccgttggacgtgtcgagactggtgtcatcaagcctggtatggtcgtgaccttcgcccctgccaacgtcaccactgaagtcaagtccgttgaaatgcaccaccagcagctccaggctggttaccctggtgacaacgtcggcttcaacgtcaagaacgtttccgtcaaggaagtccgccgtggcaacgttgccggtgactccaagaacgacccccccaagggctgcgagtccttcaacgcccaggtcatcgtcctcaaccaccccggccaggttggcgctggttatgccccagtcctcgactgccacactgcccacattgcttgcaagttctctgagctcatcgagaagattgaccgccgtaccggaaagtctgttgaggacaaccccaagttcatcaagtccggtgatgctgctatcgtcaagatgatt

SEQ ID NO: 1277 - DNA, 1046 bp, Exophiala dermatitidis ATCC 76088
ccgagcgtgagcgtggtatcaccatcgatatcgccctctggaagttcgagacccccaagtactatgtcaccgtcatcgacgccccgggtcatcgtgactttatcaagaacatgatcactggtacctcgcaggccgactgcgccatcttgatcattgccgccggtaccggtgaattcgaagccggtatctccaaggatggtcagacccgtgagcacgctctgctcgcctacaccttgggtgtcaagcagctcatcgtcgccatcaacaagatggacaccaccaagtggtccgaggagcgtttcaacgaaatcatcaaggagacttccaacttcatcaagaaggtcggctacaaccccaaggccgttcctttcgtccccatctccggcttcaacggtgacaacatgattgaggtctccaccaactgcccgtggtacaagggatgggagaaggagtccaaggctggcaaggccaccggcaagaccctcctcgaggccattgacgccatcgacccacccacccgtcccaccgacaagcctctccgtctccctctccaggatgtctacaagatctctggtatcggaacggttcctgtcggtcgtgtcgagaccggtaccatcaaggccggtatggtcgtcaccttcgctccggccaacgtcaccactgaagtcaagtccgtcgaaatgcaccacgagcagctcgccgagggtytgccaggtgacaacgttggcttcaacgtcaagaacgtytccgtcaaggaggttcgtcgtggtaacgttgccggtgactccaagaacgacccgcccaagggtgccgagtccttcaacgcccaggtcattgtcctcaaccaccctggtcagatcggtgccggctacgctccagtcttggattgccacactgcccacattgcttgcaagttcgccgagttgctcgagaagatcgaccgtcgtaccggaaagtccatcgagaacaaccccaagttcatcaagtctggtgatgctgccatcgtcaagatgattcccagcaagcccatgtgtgtcgaggctttc

SEQ ID NO: 1278 - DNA, 1109 bp, Fusarium moniliforme strain WSA-213
cgtgagcgtggtatcaccatcgatattgctctctggaagttcgagactcctcgctactatgtcaccgtcattggtatgttgtcgctcatacctcatcctacttcctcatactaacacatcattcagacgctcccggtcaccgtgatttcatcaagaacatgatcactggtacttcccaggccgattgcgccattctcatcattgccgccggtactggtgagttcgaggctggtatctccaaggatggccagacccgtgagcacgctcttcttgcctacacccttggtgtcaagaacctcatcgtcgccatcaacaagatggacaccaccaagtggtctgaggcccgttaccaggagatcatcaaggagacctcctctttcatcaagaaggtcggctacaaccccaaggctgtcgctttcgtccccatctccggtttcaacggtgacaacatgcttaccccctccaccaactgcccctggtacaagggttgggagcgtgagatcaagtccggcaagctctccggcaagaccctcctcgaggccattgactccatcgagcctcccaagcgtcccgttgacaagcccctccgtcttcccctccaggatgtctacaagatcggtggtattggaacggttcccgtcggccgtattgagactggtgtcatcaagcccggtatggtcgttaccttcgctccctccaacgtcaccactgaagtcaagtccgtcgaratgcaccacgagcagytcagtkagggccagcccggtgacaacgttggtttcaacgtgaagaacgtttccgtcaaggacatccgacgtggtaacgtcgctggtgactccaagaacgaccccccccagggtgccgcttctttcaccgcccaggtcatcgtcctcaaccaccccggccaggtcggtgctggttacgctcctgtcctcgattgccacactgcccacattgcctgcaagttcgccgagatccaggagaagatcgaccgccgaaccggtaaggctactgaggccgctcccaagttcatcaagtctggtgactccgccatcgtcaagatggttccctccaagcccatgtgtgtcgaggctttcactgactaccctcct

SEQ ID NO: 1279 - DNA, 765 bp, Aspergillus terreus strain WSA-174
cctgcaagtggtctgaggaccgttacaacgaaatcgtgaaggagacctccaacttcatcaagaaggtcggctacaaccccaaggccgttcccttcgtccccatctccggtttcaacggtgacaacatgcttgagccttcccccaactgcccctggtacaagggttgggagaaggagggcaagtccggcaaggtcaccggtaagactctcctcgaggccatcgatgccatcgagccccccgtccgtcctgccaacaagcctctccgtcttcccctccaggatgtgtacaagatctctggtatcggaactgtccccgtcggccgtgtcgagactggtgtcatcacccccggcatggttgttaccttcgctccttccaacgtcaccactgaagtgaagtccgttgagatgcaccaccagcagctcaaggagggtctccccggtgacaacgttggtttcaacgtcaagaacgtctccgtcaaggaggtccgtcgtggtaacgtcgctggtgactccaagaacgacccccctgctggcgctgcctccttcaccgcccaggtcatcgttctcaaccaccccggtcaggtcggcgctggctacgcccccgtcctcgactgccacactgcccacattgcctgcaagttcgctgagctccaggagaagattgaccgccgtaccggaaagtctgttgagtcttctcccaagttcatcaagtctggtgatgctgccatcgtcaagatgatccctycaaagcccatgtgcgtcgaag

SEQ ID NO: 1280 - DNA, 1105 bp, Aspergillus fumigatus ATCC 64746
gcgtggtatcaccatcgacattgccctctggaagttccagactcccaagtatgaggtcactgtcatcggtaagctcgactcgccccgatatgttttggtgctgtagctaacacgatctgaagatgcccccggtcaccgtgacttcatcaagaacatgatcactggtacctcccaggctgactgcgctatcctcatcattgcctccggtactggtgagttcgaggctggtatctccaaggatggccagacccgtgagcacgctctgctggctttcaccctcggtgtcaagcagctcatcgtcgccctcaacaagatggacacctgcaagtggtccgaggatcgttacaacgaaattgtcaaggaaacctccaacttcatcaagaaggtcggctacaaccccaaggccgttcccttcgtmcccatckctggcttcaacggtgacaacatgcttgagccctcctccaactgcccctggtacaagggatgggagaaggagaccaaggccggcaaggtcactggtaagaccctcatcgaggccatygacgccattgagccccctgtccgtccctccaacaagcccctycgtcttcccctccaggatgtytacaagatctctggtatcggaacggtccctgtcggccgtgtcgagaccggtatcatcaagcccggcatggtcgtcacctttgcccccgccaacgtcaccactgaagtcaagtccgtcgaaatgcaccaccagcagctccaggagggtgtccccggtgacaacgtcggtttcaacgtcaagaacgtttccgtcaaggaagtccsccgtggtaacgtttgcggtgactccaagaacgatccccctcagggtgctgcctccttcaacgcccaggtcatcgtcctcaaccaccccggtcaggtcggcgctggttacgcccccgtcctcgactgccacactgcccacattgcttgcaagttctytgagctgcttgagaagattgaccgccgtaccggcaagtctgttgagaacaaccccaagttcatcaagtccggtgawgccgccatcgtgaagatggttccttccaagcccatgtgtgtcgagtccttcactgactacccccct

SEQ ID NO: 1281 - DNA, 1343 bp, Cryptococcus laurentii ATCC 44096
gccgagcgagagcgaggtatcaccatcgacattgctctctggaagttcgagacccccaagtacaacgtcaccgtcattgacgcccccggacaccgagacttcatcaagaacatgatcaccggtacctcccaggccgactgcgccatccttatcattgccaccggtatcggagagttcgaggccggtatctctaaggacggtcagacccgagagcacgctttgctcgccttcaccctcggtgtcaggcagctcatcgttgcttgcaacaagatggacacctgcaagtggtccgaggaccgattcaacgagatcgtcaaggagaccaacggtttcatcaagaaggtcggatacaaccccaaggctgttcccttcgtccccatctctggatggcacggagacaagtgagtgccgttctttgcgttgagccctctttgtcgctccccctccctctcaagtggcggcggcggtctccacccacaaatcgggtggcgaatccgccacacccaccacttctcgccaccgagtgtggcacttcttccaactcctctttccactcctcctcgtctcgtctctttttttctccgttgtctttgacaaggggagtgtgctgatagtaaagcatgcttgaggagaccaccaacatgccgtggtacaagggatggaccaaggagaccaagtccggtgtcgttaagggtaagaccctcctcgacgccatcgacgccatcgagcctcctcaacgacccaccgacaagcccctccgacttcccctccaggatgtctacaagatcggtggtatcggtacggtgcccgtcggccgagtcgagaccggtgtcatcaaggccgggtaagtcacgggagcctgacggctgttgttgccacacccaacttatatccagtatggtcgtcaccttcgctcctaccaacgtcaccactgaggttaagtccgttgagatgcaccacgagcagatccctgagggtcttcccggagacaacgttggtttcaacgtgaagaacgtttccatcaaggacatccgacgaggaaacgtytgctccgactccaagaacgaccccgctaaggaggccgcttctttcaacgcccaggtcattgtcctcaaccaccctggacagattggtgccggttacacccccgtcctcgactgccacaccgcccacattgcctgcaagttcgccgagctcatcgagaagatcgaccgacgaactggtaagaccatggaggccgcccccaagttcgtcaagtccggagacgccgccattgtcaagctcgttgcccagaagcccatctgtgtcgagtcttactctgactaccctccccttggacgatt

SEQ ID NO: 1282 - DNA, 734 bp, Emmonsia parva ATCC 10784
tggtccgaggctcgtttcaacgaaatcatcaaggaagtcaccaacttcatcaagaaggtcggatacaaccccaagtctgttcccttcgtgccaatctctggtttcgagggtgataacatgattgagccctccaccaactgcccctggtacaagggctggaccaaggagaccgctgccggcaagtcaaccggtaagactcttcttgacgccattgatgccatcgatcaaccctcccgtcctaccgacaagcccctccgtcttcccctccaggatgtgtacaagatctccggtattggcactgttcccgttggacgtgttgagactggtatcatcaagcctggtatggtcgtgaccttcgctccctccaacgtcaccactgaagtcaagtccgtcgaaatgcaccaccaacagctcttggctggtaaccccggtgacaacgtcggtttcaacgtcaagaacgtttccgtcaaggaagtccgccgtggcaacgttgctggtgactcaaagaacgacccccccaagggctgcgactccttcaacgcccaggtcatcgtcctcaatcaccccggtcaagttggcgctggttatgccccagtcctcgactgccacactgcccacattgcttgcaagttctctgagctcctcgagaagattgaccgccgtaccggaaagtccactgagaacaaccccaagttcatcaagtctggtgacgccgctatcgtcaagatggttcc

SEQ ID NO: 1283 - DNA, 1107 bp, Fusarium solani ATCC 62877
cgtgagcgtggtatcaccatcgacattgccctctggaagttcgagactccccgctactatgtcaccgtcattggtatgttgctgtcacctctctcacacatgtctcaccactaacaatcaacagacgcccccggccaccgtgacttcatcaagaacatgatcactggtacttcccaggccgactgcgccattctcatcattgccgctggtactggtgagttcgaggctggtatctccaaggatggccagacccgtgagcacgccctgctcgcctacaccctcggtgtcaagaacctcattgtcgccatcaacaagatggacaccaccaagtggtccgagtcccgttaccaggagatcatcaaggagacctccaacttcatcaagaaggtcggctacaaccccaaggctgtcgctttcgtccccatctccggtttcaacggcgacaacatgcttactccctccaccaactgcccctggtacaagggctgggagcgtgagatcaagtccggcaagctcactggcaagaccctcctcgaggccattgactccatcgagccccccaagcgtcccgtcgacaagcccctccgacttcccctccaggatgtctacaagatcggtggtattggcacggttcccgtcggccgtatcgagactggtgtcatcaagcccggtatggtcgttaccttcgccccctccaacgtcaccactgaagtcaagtccgtcgagatgcaccacgagcagctctytgagggtcttcccggtgacaacgtcggcttcaacgtkaagaacgtytccgtcaaggagatccgacgtggcaacgtcgctggtgactccaagaacgacccccctytgggtgccgcctctttcaccgcccaggtcattgtcctcaaccaccctggccaggtcggtgccggttacgcccccgttytggactgccacactgcccacattgcctgcaagttcgccgagatccaggagaagatcgaccgccgaactggtaaggctgttgagtccgcccccaagttcatcaagtctggtgactccgccatcgtcaagatggttccctccaagcccatgtgcgttgaggctttcactgactacccccct

SEQ ID NO: 1284 - DNA, 1045 bp, Sporothrix schenckii ATCC 14285
gctcaaggccgagcgtgagcgcggtatcaccatcgatattgctctgtggaagttcgagacccccaagtactacgtcaccgtcattgacgcccccggtcatcgcgatttcatcaagaacatgatcactggtacctcgcaggccgactgcgccattctcatcattgccgctggtactggtgagttcgaggctggtatctccaaggatggccagactcgtgagcacgctctgctcgcctacaccctgggtgtgcggcagctgatcgtcgccatcaacaagatggacacggccaagtgggctgaggctcgttaccaggagatcatcaaggagacctccaacttcatcaagaaggtcggctacaaccccaagactgttgccttcgtccccatctcgggcttccacggcgacaacatgcttactccctcgaccaactgcccctggtacaagggctgggagaaggagggcaagagcggcaaggttaccggtaagactctgctggacgccattgacgccgtcgagccccccaagcgccccacggacaagcccctgcgtctgcccctccaggatgtctacaagatcggcggtatcggcactgtccctgtcggccgtatcgagactggtgtcctgaagcccggcatggtcgtcacctttgccccgtccaacgtcaccactgaagtcaagtccgtcgagatgcaccacgagcagcttgttgagggtgttcccggcgacaacgtcggcttcaacgtcaagaacgtytccgtcaaggagatccgtygtggcaacgttgccggtgactccaagaacgaccccccctcgggcgccgccaccttcaacgcccaggtcattgtcctgaaccaccccggccaggtcggcaacggctacgccccggttytggactgccacaccgcccacattgcctgcaagttcaccgagatccttgagaagatcgaccgccgtaccggcaagtcggttgagaacaaccccaagttcatcaagtcgggtgacgccgccattgtcaagctgacgccctygaagcccatgtgcgtt

SEQ ID NO: 1285 - DNA, 764 bp, Aspergillus nidulans strain WSA-176
ttgccagtggtccgaggcccgttacaacgaaatcgtcaaggagacttccggtttcatcaagaaggtcggatacaaccccaagtccgttgccttcgtccccatctccggtttcaacggtgacaacatgctcgaggcctctaccaactgcccctggtacaagggttgggagaaggagaccaaggccggtaaggccactggtaagaccctccttgaggccatcgacgccattgagccccccacccgtccctccaacaagcccctccgtcttcccctccaggatgtctacaagatctccggtattggaactgtccccgtcggccgtgtcgagactggtgttatcacccccggcatggtcgtcaccttcgctcctgccaacgtcaccactgaagtcaagtccgttgagatgcaccaccagcagctcaaggagggtgtccccggtgacaacgtcggtttcaacgtcaagaacgtttccgtcaaggaaatccgtcgtggtaacgttgcctccgactccaagaacgaccccgcctccggcgctgcctctttcaacgcccaggtcatcgttctcaaccaccccggtcaggtcggtgctggttacgcccccgtcctcgactgccacaccgcccacattgcttgcaagttctctgagcttcttgagaagattgaccgccgtaccggaaaggctgttgaaaccagccccaagttcatcaagtccggtgacgctgccatcgtcaagatgattccttccaagcccatgtgcgktccga

SEQ ID NO: 1286 - DNA, 971 bp, Cladophialophora carrionii ATCC 16264
accatcgatatcgcgctctggaagttcgagactcccaagtacttcgtcaccgtcatcgatgcccctggtcatcgtgacttcatcaagaacatgatcactggtacctcccaggctgattgtgctattctcatcattgccgctggtactggtgagttcgaggccggtatctccaaggatggccagacccgtgagcatgctctgctcgcctacaccctgggcgtgaagcagcttatcgtcgccatcaacaagatggacaccaccaaatggtctgaggatcgtttcaacgaaatcatcaaggagacttccaacttcatcaagaaggtcggatacaaccccaagtccgttccattcgtgcccatctccggcttcaacggtgacaacatgatcgacgtctccaccaatgccccctggtacaagggctgggaaaaggagtccaaggctggcaaggccaccggcaagaccctccttgaggctatcgactccatcgaccctcctgctcgtcccaccgacaagcctctccgtctcccactccaggatgtctacaagatttctggtatcggcacggtgcccgtcggtcgtgttgagactggtaccatcaaggccggtatggtcgtcacctttgcccccgccaacgtcaccactgaagtcaagtccgtcgaaatgcaccacgaacagctygccgagggcgttccgggtgacaacgtcggcttcaacgtcaagaacgtytccgtgaaggaggttcgtcgtggaaacgttgctggtgactccaagaacgacccccccaagggtgccgactccttcaacgcccaggtcatcgtcctcaaccaccctggtcaggtcggtgctggctacgccccggtcttggattgccacactgcccacattgcctgcaagttctytgagctcctcgagaagatcgatcgtcgkaccggcaagtccatggaaaacaaccccaagttcatcaagtctgg

SEQ ID NO: 1287 - DNA, 732 bp, Exserohilum rostratum strain WSA-215
ggtctgaggaccgttaccaggagatcatcaaggagacctccaacttcatcaagaaggtcggctacaaccccaagcacgttcccttcgtccccatctccggtttcaacggagacaacatgatcgaggcctccagcaactgcccctggtacaagggttgggagaaggagaccaaggccaaggccactggtaagaccctccttgaggccattgacgccatcgaccctcccagccgtcctaccgacaagcccctccgtcttcccctccaggatgtctacaagattggtggtattggcacggttcccgtcggtcgtgtcgagaccggtatcatcaaggccggtatggtcgtcaccttcgcccccgctggtgtcaccactgaagtcaagtccgtcgagatgcaccacgagcagcttaccgagggtgtccccggtgacaacgtcggcttcaacgtcaagaacgtctccgtcaaggagatccgtcgtggtaacgttgccggtgactccaagaacgacccccccaagggctgcgagtctttcaacgctcaggtcattgtcctcaaccaccctggtcaggtcggtgccggttacgcgccagtcctcgactgccacaccgcccacattgcctgcaagttctctgagctcctcgagaagattgaccgccgtaccggaaagtctgtcgaagcctctcccaagttcatcaagtctggtgacgcggccatcgtcaagatggttccct

SEQ ID NO: 1288 - DNA, 337 bp, Bacillus thuringiensis strain HER 1236
aatggatcctgtatacgcacaaaaattaggcgttaacatagatgaattrctattatcacagcctgatacaggggagcaaggattggaaatcgcggaagcacttgtacgaagtggtgcggttgacattatcgtaattgactctgtagcagctcttgtaccgaaagcagagattgaaggcgatatgggtgactcacacgtaggtttacaagcacgtttaatgtcacaagcacttmgtaagctttcaggagcaatcaacaaatcarrarcaatwgcaatctttattaaccaaattcgwgaaaaagttggggttatgttcggaaacccagaaacaactcca

SEQ ID NO: 1289 - DNA, 336 bp, Bacillus thuringiensis strain HER 1232
aatggatcctgtatatgcacaaaaattaggcgttaacatagatgaattrctattatcacagcctgatacaggggagcaaggattggaaatcgcggaagcacttgtacgaagtggtgcggttgacattatcgtaattgactctgtagcagctcttgtaccgaaagcagagattgaaggcgatatgggtgactcacacgtaggtttacaagcacgtttaatgtcacaagcacttmgtaagctttcaggagcaatcaacaaatcaraarcaattgcaatctttattaaccaaattcgtgaaaaagttggggttatgttcggaaacccagaaacaactcc

SEQ ID NO: 1290 - DNA, 23 bp, Artificial Sequence
  Synthetic DNA Sequence
  modified_base (9): i
  modified_base (12): i
  modified_base (15): i
  modified_base (18): i
gaytaygcnatgnsngtnathgt

SEQ ID NO: 1291 - DNA, 23 bp, Artificial Sequence
  Synthetic DNA Sequence
  modified_base (3): i
  modified_base (6): i
  modified_base (9): i
  modified_base (15): i
  modified_base (18): i
gcnytnccngaygtnmgngaygg

SEQ ID NO: 1292 - DNA, 20 bp, Artificial Sequence
  Synthetic DNA Sequence
  modified_base (3): i
  modified_base (9): i
  modified_base (12): i
  modified_base (18): i
arnscytcnarnatrtgngc

SEQ ID NO: 1293 - DNA, 20 bp, Artificial Sequence
  Synthetic DNA Sequence
atggctgaattacctcaatc

SEQ ID NO: 1294 - DNA, 25 bp, Artificial Sequence
  Synthetic DNA Sequence
atgattgttgtatatcttcttcaac

SEQ ID NO: 1295 - DNA, 20 bp, Artificial Sequence
  Synthetic DNA Sequence
cagaaagtttgaagcgttgt

SEQ ID NO: 1296 - DNA, 20 bp, Artificial Sequence
  Synthetic DNA Sequence
aacgattcgtgagtcagata

SEQ ID NO: 1297 - DNA, 22 bp, Artificial Sequence
  Synthetic DNA Sequence
cggtcaacattgaggaagagct

SEQ ID NO: 1298 - DNA, 23 bp, Artificial Sequence
  Synthetic DNA Sequence
acgaaatcgaccgtctctttttc

SEQ ID NO: 1299 - DNA, 2661 bp, Staphylococcus aureus strain 601055
atggctgaattacctcaatcaagaataaatgaacgaaatattaccagtgaaatgcgtgaatcatttttagattatgcgatgagtgttatcgttgctcgtgcattgccagatgttcgtgacggtttaaaaccagtacatcgtcgtatactatatggattaaatgaacaaggtatgacaccggataaatcatataaaaaatcagcacgtatcgttggtgacgtaatgggtaaatatcaccctcatggtgactcatctatttatgaagcaatggtacgtatggctcaagatttcagttatcgttatccgcttgttgatggccaaggtaactttggttcaatggatggagatggcgcagcagcaatgcgttatactgaagcgcgtatgactaaaatcacacttgaactgttacgtgatattaataaagatacaatagattttatcgataactatgatggtaatgaaagagagccgtcagtcttacctgctcgattccctaatttattagccaatggtgcatcaggtatcgcggtaggtatggcaacgaatattccaccacataacttaacagaattaatcaatggtgtacttagcttaagtaagaaccctgatatttcaattgctgagttaatggaagatattgaaggtcctgatttcccaactgctggacttattttaggtaagagtggtattagacgtgcatatgaaacaggtcgtggttcaattcaaatgcgttctcgtgcagttattgaagaacgtggaggcggacgtcaacgtattgttgtcactgaaattcctttccaagtgaataaggctcgtatgattgaaaaaattgcagagctcgttcgtgacaagaaaattgacggtatcactgatttacgtgatgaaacaagtttacgtactggtgtgcgtgtcgttattgatgtgcgtaaggatgcaaatgctagtgtcattttaaataacttatacaaacaaacacctcttcaaacatcatttggtgtgaatatgattgcacttgtaaatggtagaccgaagcttattaatttaaaagaagcgttggtacattatttagagcatcaaaagacagttgttagaagacgtacgcaatataacttacgtaaagctaaagatcgtgcccatattttagaagggttacgtatcgcacttgaccatatcgatgaaattatttcaacgattcgtgagtcagatacagataaagttgcaatggaaagcttgcaacaacgcttcaaactttctgaaaaacaagctcaagctattttagacatgcgtttaagacgtctaacaggtttagagagaaacaaaattgaagctgaatataatgagttattaaattatattagtgaattagaagccatcttagctgatgaagaagtgttattacagttagttagagatgaattgactgaaattagagatcgtttcggtgatgagcgtcgtacagaaattcaattaggtggatttgaagacttagaggacgaagacttaattccagaagaacaaatagtaattactttgagccataataactacattaaacgtttgccggtatctacatatcgtgctcaaaaccgtggtggtcgtggtgttcaaggtatgaatacattggaagaagattttgtcagtcaattggtaactttaagtacacatgaccatgtattgttctttactaacaaaggtcgtgtatacaaactaaaaggttatgaagtgcctgagttatcaagacagtctaaaggtattcctgtagtgaatgctattgaacttggaaatgatgaagtcattagtacaatgattgctgttaaagaccttgaaagtgaagacaacttcttagtgtttgcaactaaacgtggtgttgttaaacgttcagcattaagtaacttctcaagaataaatagaaatggtaagattgcgatttcgttcagagaagatgatgagttaattgcagttcgtttaacaagtggtcaagaagatatcttgattggtacatcacatgcatcattaattcgattccctgaatcaacattacgtcctttaggccgtacagcaacgggtgtgaaaggtattacacttcgtgaaggtgacgaagttgtagggcttgatgtagctcatgcaaacagtgttgatgaagtattagtagttactgaaaatggttatggtaaacgtacgccagttaatgactatcgtttatcaaatcgtggtggtaaaggtattaaaacagctacgattactgagcgtaatggtaatgttgtatgtatcactacagtaactggtgaagaagatttaatgattgttactaatgccggtgtcattattcgactagatgttgcagatatttctcaaaatggtcgtgcagcacaaggtgttcgcttaattcgcttaggcgatgatcaatttgtttcaacggttgctaaagtaaaagaggatgcagatgaagtaaatgaagatgaacaatctactgtatctgaagatggtactgaacaacaacgtgaagcggttgtaaatgatgaaacaccaggaaatgcaattcatactgaagtgattgattcagaagaaaatgatgaagatggacgtattgaagtaagacaagatttcatggatcgtgttgaagaagatatacaacaatcatcagatgaagatgaagaataa

SEQ ID NO: 1300 - DNA, 2628 bp, Escherichia coli strain K12
atgagcgaccttgcgagagaaattacaccggtcaacattgaggaagagctgaagagctcctatctggattatgcgatgtcggtcattgttggccgtgcgctgccagatgtccgagatggcctgaagccggtacaccgtcgcgtactttacgccatgaacgtactaggcaatgactggaacaaagcctataaaaaatctgcccgtgtcgttggtgacgtaatcggtaaataccatccccatggtgactcggcggtctatgacacgatcgtccgcatggcgcagccattctcgctgcgttatatgctggtagacggtcagggtaacttcggttctatcgacggcgactctgcggcggcaatgcgttatacggaaatccgtctggcgaaaattgcccatgaactgatggccgatctcgaaaaagagacggtcgatttcgttgataactatgacggcacggaaaaaattccggacgtcatgccaaccaaaattcctaacctgctggtgaacggttcttccggtatcgccgtaggtatggcaaccaacatcccgccgcacaacctgacggaagtcatcaacggttgtctggcgtatattgatgatgaagacatcagcattgaagggctgatggaacacatcccggagccggacttcccgacggcggcaatcattaacggtcgtcgcggtattgaagaagcttaccgtaccggtcgcggcaaggtgtatatccgcgctcgcgcagaagtggaagttgacgccaaaaccggtcgtgaaaccattatcgtccacgaaattccgtatcaggtaaacaaagcgcgcctgatcgagaagattgcggaactggtaaaagaaaaacgcgtggaaggcatcagcgcgctgcgtgacgagtctgacaaagacggtatgcgcatcgtgattgaagtgaaacgcgatgcggtcggtgaagttgtgctcaacaacctctactcccagacccagttgcaggtttctttcggtatcaacatggtggcattgcaccatggtcagccgaagatcatgaacctgaaagacatcatcgcggcgtttgttcgtcaccgccgtgaagtggtgacccgtcgtactattttcgaactgcgtaaagctcgcgatcgtgctcatatccttgaagcattagccgtggcgctggcgaacatcgacccgatcatcgaactgatccgtcatgcgccgacgcctgcagaagcgaaaactgcgctggttgctaatccgtggcagctgggcaacgttgccgcgatgctcgaacgtgctggcgacgatgctgcgcgtccggaatggctggagccagagttcggcgtgcgtgatggtctgtactacctgaccgaacagcaagctcaggcgattctggatctgcgtttgcagaaactgaccggtcttgagcacgaaaaactgctcgacgaatacaaagagctgctggatcagatcgcggaactgttgcgtattcttggtagcgccgatcgtctgatggaagtgatccgtgaagagctggagctggttcgtgaacagttcggtgacaaacgtcgtactgaaatcaccgccaacagcgcagacatcaacctggaagatctgatcacccaggaagatgtggtcgtgacgctctctcaccagggctacgttaagtatcagccgctttctgaatacgaagcgcagcgtcgtggcgggaaaggtaaatctgccgcacgtattaaagaagaagactttatcgaccgactgctggtggcgaacactcacgaccatattctgtgcttctccagccgtggtcgcgtctattcgatgaaagtttatcagttgccggaagccactcgtggcgcgcgcggtcgtccgatcgtcaacctgctgccgctggagcaggacgaacgtatcactgcgatcctgccagtgaccgagtttgaagaaggcgtgaaagtcttcatggcgaccgctaacggtaccgtgaagaaaactgtcctcaccgagttcaaccgtctgcgtaccgccggtaaagtggcgatcaaactggttgacggcgatgagctgatcggcgttgacctgaccagcggcgaagacgaagtaatgctgttctccgctgaaggtaaagtggtgcgctttaaagagtcttctgtccgtgcgatgggctgcaacaccaccggtgttcgcggtattcgcttaggtgaaggcgataaagtcgtctctctgatcgtgcctcgtggcgatggcgcaatcctcaccgcaacgcaaaacggttacggtaaacgtaccgcagtggcggaatacccaaccaagtcgcgtgcgacgaaaggggttatctccatcaaggttaccgaacgtaacggtttagttgttggcgcggtacaggtagatgactgcgaccagatcatgatgatcaccgatgccggtacgctggtacgtactcgcgtttcggaaatcagcatcgtgggccgtaacacccagggcgtgatcctcatccgtactgcggaagatgaaaacgtagtgggtctgcaacgtgttgctgaaccggttgacgaggaagatctggataccatcgacggcagtgccgcggaaggggacgatgaaatcgctccggaagtggacgttgacgacgagccagaagaagaataa

SEQ ID NO: 1301 - DNA, 23 bp, Artificial Sequence
  Synthetic DNA Sequence
  modified_base (3): i
  modified_base (6): i
  modified_base (9): i
  modified_base (12): i
  modified_base (15): i
  modified_base (18): i
gtnmgnawnmgnccngsnatgta

SEQ ID NO: 1302 - DNA, 23 bp, Artificial Sequence
  Synthetic DNA Sequence
  modified_base (3): i
  modified_base (6): i
  modified_base (9): i
  modified_base (12): i
  modified_base (15): i
  modified_base (18): i
tanadnggnggnkkngcnatrta

SEQ ID NO: 1303 - DNA, 20 bp, Artificial Sequence
  Synthetic DNA Sequence
  modified_base (3): i
  modified_base (6): i
  modified_base (9): i
  modified_base (12): i
  modified_base (15): i
ggngangandynmgngargg

SEQ ID NO: 1304 - DNA, 19 bp, Artificial Sequence
  Synthetic DNA Sequence
  modified_base (2): i
  modified_base (8): i
  modified_base (11): i
  modified_base (14): i
cnaryttnkynttngtytg

SEQ ID NO: 1305 - DNA, 22 bp, Artificial Sequence
  Synthetic DNA Sequence
atggtgactgcattgtcagatg

SEQ ID NO: 1306 - DNA, 22 bp, Artificial Sequence
  Synthetic DNA Sequence
gtctacggttttctacaacgtc

SEQ ID NO: 1307 - DNA, 1923 bp, Staphylococcus aureus
atggtgactgcattgtcagatgtaaacaacacggataattatggtgctgggcaaatacaagtattagaaggtttagaagcagtacgtaaaagaccaggtatgtatataggatcgactcagagagagttgcacattagtgtggaaattgtcgataatagtatcgatgaagcattagctggttatgcaaataaaattgaagttgttattgaaaaagataactggattaaagtaacggataacggacgtggtatcccagttgatattcaagaaaaaatgggacgtccagctgtcgaagttattttaactgttttacatgctggtggtaaattcggcggtggcggatacaaagtatctggtggtttacatggtgttggttcatcagttgtaaacgcattgtcacaagacttagaagtatatgtacacagaaatgagactatatatcatcaagcatataaaaaaggtgtacctcaatttgacttaaaagaagttggcacaactgataagacaggtactgtcattcgttttaaagcagatggagaaatcttcacagagacaactgtatacaactatgaaacattacagcagcgtattagagagcttgctttcttaaacaaaggaattcaaatcacattaagagatgaacgtgatgaagaaaacgttagagaagactcctatcactatgagggcggtattaaatcgtacgttgagttattgaacgaaaataaagaacctattcatgatgagccaatttatattcatcaatctaaagatgatattgaagtagaaattgcgattcaatataactcaggatatgccacaaatcttttaacttacgcaaataacattcatacgtacgaaggtggtacgcatgaagacggattcaaacgtgcattaacgcgtgtcttaaatagttatggtttaagtagcagatatgaagaagaaaagatagcttctggtgaagatacacgagaaggtatgacagcaattatatctatcaaacatggtgatcctcaattcgaaggtcaaacgaagacaaaattaggtaattctgaagtgcgtcaagttgtagataaattattctcagagcactttgaacgatttttatatgaaaatccacaagtcgcacgtacagtggttgaaaaaggtattatggcggcacgtgcacgtgttgctgcgaaaaaagcgcgtgaagtaacacgtcgtaaatcagcgttagatgtagcaagtcttccaggtaaattagccgattgctctagtcaaagtcctgaagaatgtgagattttcttagtcgaaggggactctgccggagggtctacaaaatctggtcgtgactctagaacgcaggcgattttaccattacgaggtaagatattaaatgttgaaaaagcacgattagatagaattttgaataacaatgaaattcgtcaaatgatcacagcatttggtacaggaatcggtggcgactttgatctagcgaaagcaagatatcacaaaatcgtcattatgactgatgccgatgtggatggagcgcatattagaacattgttattaatattcttctatcgatttatgagaccgttaattgaagcaggctatgtgtatattgcacagccaccgttgtataaactgacacaaggtaaacaaaagtattatgtatacaatgatagggaacttgataaacttaaatctgaattgaatccaacaccaaaatggtctattgcgctatacaaaggtcttggagaaatgaatgcagatcaattatgggaaacaacaatgaaccctgagcaccgcgctcttttacaagtaaaacttgaagatgcgattgaagcggaccaaacatttgaaatgttaatgggtgacgttgtagaaaaccgtagacaatttatagaagataatgcagtttatgcaaacttagacttctaa

SEQ ID NO: 1308 - DNA, 23 bp, Artificial Sequence
  Synthetic DNA Sequence
  modified_base (9): i
  modified_base (12): i
  modified_base (21): i
atgtaygtnatnatggaymgngc

SEQ ID NO: 1309 - DNA, 23 bp, Artificial Sequence
  Synthetic DNA Sequence
  modified_base (3): i
  modified_base (12): i
  modified_base (18): i
atnatyttrttnccyttnccytt

SEQ ID NO: 1310 - DNA, 20 bp, Artificial Sequence
  Synthetic DNA Sequence
  modified_base (3)
  modified_base (6): i
  modified_base (9): i
  modified_base (12): i
atnatntsnatnacytcrtc

SEQ ID NO: 1311 - DNA, 23 bp, Artificial Sequence
  Synthetic DNA Sequence
  modified_base (12): i
  modified_base (15): i
  modified_base (18): i
garatgaaratnmgnggngarca

SEQ ID NO: 1312 - DNA, 23 bp, Artificial Sequence
  Synthetic DNA Sequence
  modified_base (9): i
  modified_base (12): i
  modified_base (21): i
aartayatnatncargarmgngc

SEQ ID NO: 1313 - DNA, 23 bp, Artificial Sequence
  Synthetic DNA Sequence
  modified_base (3): i
  modified_base (6): i
  modified_base (12): i
  modified_base (15): i
  modified_base (18): i
amnaynckrtgnggnttnttytt

SEQ ID NO: 1314 - DNA, 23 bp, Artificial Sequence
  Synthetic DNA Sequence
  modified_base (3): i
  modified_base (6): i
  modified_base (12): i
  modified_base (15): i
  modified_base (18): i
tanganttyacngansmncargc

SEQ ID NO: 1315 - DNA, 23 bp, Artificial Sequence
  Synthetic DNA Sequence
  modified_base (3): i
  modified_base (6): i
  modified_base (9): i
  modified_base (12): i
  modified_base (18): i
acnatngcntcngcytgnksytc

SEQ ID NO: 1316 - DNA, 22 bp, Artificial Sequence
  Synthetic DNA Sequence
gtgagtgaaataattcaagatt

SEQ ID NO: 1317 - DNA, 22 bp, Artificial Sequence
  Synthetic DNA Sequence
caccaaaatcatctgtatctac

SEQ ID NO: 1318 - DNA, 26 bp, Artificial Sequence
  Synthetic DNA Sequence
acctaytcsatgtacgtratcatgga

SEQ ID NO: 1319 - DNA, 23 bp, Artificial Sequence
  Synthetic DNA Sequence
  modified_base (9): i
agrtcgtcnaccatcggyagytt

SEQ ID NO: 1320 - DNA, 2259 bp, Escherichia coli strain K-12 MG1655
atgagcgatatggcagagcgccttgcgctacatgaatttacggaaaacgcctacttaaactactccatgtacgtgatcatggaccgtgcgttgccgtttattggtgatggtctgaaacctgttcagcgccgcattgtgtatgcgatgtctgaactgggcctgaatgccagcgccaaatttaaaaaatcggcccgtaccgtcggtgacgtactgggtaaataccatccgcacggcgatagcgcctgttatgaagcgatggtcctgatggcgcaaccgttctcttaccgttatccgctggttgatggtcaggggaactggggcgcgccggacgatccgaaatcgttcgcggcaatgcgttacaccgaatcccggttgtcgaaatattccgagctgctattgagcgagctggggcaggggacggctgactgggtgccaaacttcgacggcactttgcaggagccgaaaatgctacctgcccgtctgccaaacattttgcttaacggcaccaccggtattgccgtcggcatggcgaccgatattccaccgcataacctgcgtgaagtggctcaggcggcaatcgcattaatcgaccagccgaaaaccacgctcgatcagctgctggatatcgtgcaggggccggattatccgactgaagcggaaattatcacttcgcgcgccgagatccgtaaaatctacgagaacggacgtggttcagtgcgtatgcgcgcggtgtggaagaaagaagatggcgcggtggttatcagcgcattgccgcatcaggtttcaggtgcgcgcgtactggagcaaattgctgcgcaaatgcgcaacaaaaagctgccgatggttgacgatctgcgcgatgaatctgaccacgagaacccgacccgcctggtgattgtgccgcgttccaaccgcgtggatatggatcaggtgatgaaccacctcttcgctaccaccgatctggaaaagagctatcgtattaaccttaatatgatcggtctggatggtcgtccggcggtgaaaaacctgctggaaatcctctccgaatggctggtgttccgccgcgataccgtgcgccgccgactgaactatcgtctggagaaagtcctcaagcgcctgcatatcctcgaaggtttgctggtggcgtttctcaatatcgacgaagtgattgagatcattcgtaatgaagatgaaccgaaaccggcgctgatgtcgcggtttggccttacggaaacccaggcggaagcgatcctcgaactgaaactgcgtcatcttgccaaactggaagagatgaagattcgcggtgagcagagtgaactggaaaaagagcgcgaccagttgcagggcattttggcttccgagcgtaaaatgaataacctgctgaagaaagaactgcaggcagacgcgcaagcctacggtgacgatcgtcgttcgccgttgcaggaacgcgaagaagcgaaagcgatgagcgagcacgacatgctgccgtctgaacctgtcaccattgtgctgtcgcagatgggctgggtacgcagcgctaaaggccatgatatcgacgcgccgggcctgaattataaagcgggtgatagcttcaaagcggcggtgaaaggtaagagcaaccaaccggtagtgtttgttgattccaccggtcgtagctatgccattgacccgattacgctgccgtcggcgcgtggtcagggcgagccgctcaccggcaaattaacgttgccgcctggggcgaccgttgaccatatgctgatggaaagcgacgatcagaaactgctgatggcttccgatgcgggttacggtttcgtctgcacctttaacgatctggtggcgcgtaaccgtgcaggtaaggctttgatcaccttaccggaaaatgcccatgttatgccgccggtggtgattgaagatgcttccgatatgctgctggcaatcactcaggcaggccgtatgttgatgttcccggtaagtgatctgccgcagctgtcgaagggcaaaggcaacaagattatcaacattccatcggcagaagccgcgcgtggagaagatggtctggcgcaattgtacgttctgccgccgcaaagcacgctgaccattcatgttgggaaacgcaaaattaaactgcgcccggaagagttacagaaagtcactggcgaacgtggacgccgcggtacgttgatgcgcggtttgcagcgtatcgatcgtgttgagatcgactctcctcgccgtgccagcagcggtgatagcgaagagtaa

SEQ ID NO: 1321 - DNA, 2403 bp, Staphylococcus aureus strain KMP9
gtgagtgaaataattcaagatttatcacttgaagatgttttaggtgatcgctttggaagatatagtaaatatattattcaagagcgtgcattgccagatgttcgtgatggtttaaaaccagtacaacgtcgtattttatatgcaatgtattcaagtggtaatacacacgataaaaatttccgtaaaagtgcgaaaacagtcggtgatgttattggtcaatatcatccacatggagacttctcagtgtacaaagcaatggtccgtttaagtcaagactggaagttacgacatgtcttaatagaaatgcatggtaataatggtagtatcgataatgatccgccagcggcaatgcgttacactgaagctaagttaagcttactagctgaagagttattacgtgatattaataaagagacagtttctttcattccaaactatgatgatacgacactcgaaccaatggtattgccatcaagatttcctaacttactagtgaatggttctacaggtatatctgcaggttacgcgacagatataccaccacataatttagctgaagtgattcaagcaacacttaaatatattgataatccggatattacagtcaatcaattaatgaaatatattaaaggtcctgattttccaactggtggtattattcaaggtattgatggtattaaaaaagcttatgaatcaggtaaaggtagaattatagttcgttctaaagttgaagaagaaactttacgcaatggacgtaaacagttaattattactgaaattccatatgaagtgaacaaaagtagcttagtaaaacgtatcgatgaattacgtgctgacaaaaaagtcgatggtatcgttgaagtacgtgatgaaactgatagaactggtttacgaatagcaattgaattgaaaaaagatgtgaacagtgaatcaatcaaaaattatctttataaaaactctgatttacagatttcatataatttcaacatggtcgctattagtgatggtcgtccaaaattgatgggtattcgtcaaattatagatagttatttgaatcatcaaattgaggttgttgcaaatagaacgaagtttgaattagataatgctgaaaaacgtatgcatatcgttgaaggtttgattaaagcgttgtcaattttagataaagtaattgaattgattcgtagctctaaaaacaagcgtgacgctaaagaaaaccttatcgaagtattcgagttcacagaagaacaggctgaagcaattgtaatgttacagttatatcgtttaacaaacactgacatagttgcgcttgaaggtgaacataaagaacttgaagcattaatcaaacaattacgtcatattcttgataaccatgatgcattattgaatgtcataaaagaagaattgaatgaaattaaaaagaaattcaaatctgaacgactgtctttaattgaagcagaaattgaagaaattaaaattgacaaagaagttatggtgcctagtgaagaagttattttaagtatgacacgtcatggatatattaaacgtacttctattcgtagctttaatgctagcggtgttgaggatattggtttaaaagatggtgacagtttacttaaacatcaagaagtaaatacgcaagataccgtactagtatttacaaataaaggtcgttatctatttataccggttcataaattagcagatattcgttggaaagaattggggcaacatgtatcacaaatagttcctatcgaagaagatgaagtggttattaatgtctttaatgaaaaggactttaatacagatgcattttatgtttttgcgactcaaaatggcatgattaagaaaagtacagtgcctctatttaaaacaacgcgttttaataaacctttaattgctactaaagttaaagaaaatgatgatttgattagtgttatgcgctttgaaaaagatcaattaattaccgtcattactaataaaggtatgtcattaacgtataatacaagtgaactatcagataccggattaagggcagctggtgttaaatcaataaatcttaaagctgaagatttcgttgttatgacagaaggtgtttctgaaaatgatactatattgatggccacacaacgcggctcgttaaaacgtattagttttaaaatcttacaagttgctaaaagagcacaacgtggaataactttattaaaagaattaaagaaaaatccacatcgtattgtagctgcacatgtagtgacaggtgaacatagtcaatatacattatattcaaaatcaaatgaagaacatggtttaattaatgatattcataaatctgaacaatatacaaatggctcattcattgtagatacagatgattttggtgaagtaatagacatgtatattagctaa

SEQ ID NO: 1322 - DNA, 22 bp, Artificial Sequence
  Synthetic DNA Sequence
  modified_base (3): i
  modified_base (6): i
  modified_base (10): i
  modified_base (12): i
  modified_base (15): i
rtnganaaynsngtngaygarg

SEQ ID NO: 1323 - DNA, 22 bp, Artificial Sequence
  Synthetic DNA Sequence
  modified_base (3): i
  modified_base (9): i
  modified_base (12): i
  modified_base (15): i
  modified_base (18): i
acnawrsanggnggnacncayg

SEQ ID NO: 1324 - DNA, 20 bp, Artificial Sequence
  Synthetic DNA Sequence
  modified_base (3): i
  modified_base (6): i
  modified_base (9): i
  modified_base (15): i
ccnccngcnswrtcnccytc

SEQ ID NO: 1325 - DNA, 21 bp, Artificial Sequence
  Synthetic DNA Sequence
  modified_base (10): i
  modified_base (13): i
  modified_base (16): i
rttcatytcnccnarnccytt

SEQ ID NO: 1326 - DNA, 22 bp, Artificial Sequence
  Synthetic DNA Sequence
tgattcaatacaggttttagag

SEQ ID NO: 1327 - DNA, 22 bp, Artificial Sequence
  Synthetic DNA Sequence
ctagatttcctcctcatcaaat

SEQ ID NO: 1328 - DNA, 1992 bp, Staphylococcus aureus strain RN4220
atgaataaacaaaataattattcagatgattcaatacaggttttagaggggttagaagcagttcgtaaaagacctggtatgtatattggatcaactgataaacggggattacatcatctagtatatgaaattgtcgataactccgtcgatgaagtattgaatggttacggtaacgaaatagatgtaacaattaataaagatggtagtatttctatagaagataatggacgtggtatgccaacaggtatacataaatcaggtaaaccgacagtcgaagttatctttactgttttacatgcaggaggtaaatttggacaaggcggctataaaacttcaggtggtcttcacggtgttggtgcttcagttgtaaatgcattgagtgaatggcttgaagttgaaatccatcgagatggtaatatatatcatcaaagttttaaaaacggtggttcgccatcttctggtttagtgaaaaaaggtaaaactaagaaaacaggtaccaaagtaacatttaaacctgatgacacaatttttaaagcatctacatcatttaattttgatgttttaagtgaacgactacaagagtctgcgttcttattgaaaaatttaaaaataacgcttaatgatttacgcagtggtaaagagcgtcaagagcattaccattatgaagaaggaatcaaagagtttgttagttatgtcaatgaaggaaaagaagttttgcatgacgtggctacattttcaggtgaagcaaatggtatagaggtagacgtagctttccaatataatgatcaatattcagaaagtattttaagttttgtaaataatgtacgtactaaagatggtggtacacatgaagttggttttaaaacagcaatgacacgtgtatttaatgattatgcacgtcgtattaatgaacttaaaacaaaagataaaaacttagatggtaatgatattcgtgaaggtttaacagctgttgtgtctgttcgtattccagaagaattattgcaatttgaaggacaaacgaaatctaaattgggtacttctgaagctagaagtgctgttgattcagttgttgcagacaaattgccattctatttagaagaaaaaggacaattgtctaaatcacttgtgaaaaaagcgattaaagcacaacaagcaagggaagctgcacgtaaagctcgtgaagatgctcgttcaggtaagaaaaacaagcgtaaagacactttgctatctggtaaattaacacctgcacaaagtaaaaacactgaaaaaaatgaattgtatttagtcgaaggtgattctgcgggaggttcagcaaaacttggacgagaccgcaaattccaagcgatattaccattacgtggtaaggtaattaatacagagaaagcacgtctagaagatatttttaaaaatgaagaaattaatacaattatccacacaatcggggcaggcgttggtactgactttaaaattgaagatagtaattataatcgtgtaattattatgactgatgctgatactgatggtgcgcatattcaagtgctattgttaacattcttcttcaaatatatgaaaccgcttgttcaagcaggtcgtgtatttattgctttacctccactttataaattggaaaaaggtaaaggcaaaacaaagcgagttgaatacgcttggacagacgaagagcttaataaattgcaaaaagaacttggtaaaggcttcacgttacaacgttacaaaggtttgggtgaaatgaaccctgagcaattatgggaaacgacgatgaacccagaaacacgaactttaattcgtgtacaagttgaagatgaagtgcgttcatctaaacgtgtaacaacattaatgggtgacaaagtacaacctagacgtgaatggattgaaaagcatgttgagtttggtatgcaagaggaccaaagtattttagataattctgaagtacaagtgcttgaaaatgatcaatttgatgaggaggaaatctag

SEQ ID NO: 1329 - DNA, 25 bp, Artificial Sequence
  Synthetic DNA Sequence
tgtagagcgcggtatcatcaaagta

SEQ ID NO: 1330 - DNA, 22 bp, Artificial Sequence
  Synthetic DNA Sequence
agattcgaacttggtgtgcggg

SEQ ID NO: 1331 - DNA, 30 bp, Artificial Sequence
  Synthetic DNA Sequence
gcccttgaggtacagaatggtaatgaagtt

SEQ ID NO: 1332 - DNA, 20 bp, Artificial Sequence
  Synthetic DNA Sequence
gaccgcggcgcagaccatca

SEQ ID NO: 1333 - DNA, 23 bp, Artificial Sequence
  Synthetic DNA Sequence
tcatggtgacttatctatttatg

SEQ ID NO: 1334 - DNA, 23 bp, Artificial Sequence
  Synthetic DNA Sequence
catctatttataaagcaatggta

SEQ ID NO: 1335 - DNA, 19 bp, Artificial Sequence
  Synthetic DNA Sequence
ctatttatggagcaatggt

SEQ ID NO: 1336 - DNA, 17 bp, Artificial Sequence
  Synthetic DNA Sequence
tggagactactcagtgt

SEQ ID NO: 1337 - DNA, 17 bp, Artificial Sequence
  Synthetic DNA Sequence
tggagacttctcagtgt

SEQ ID NO: 1338 - DNA, 15 bp, Artificial Sequence
  Synthetic DNA Sequence
gtgtacggagcaatg

SEQ ID NO: 1339 - DNA, 15 bp, Artificial Sequence
  Synthetic DNA Sequence
ccagcggaaatgcgt

SEQ ID NO: 1340 - DNA, 25 bp, Artificial Sequence
  Synthetic DNA Sequence
gaacaaggtatgacaccggataaat

SEQ ID NO: 1341 - DNA, 25 bp, Artificial Sequence
  Synthetic DNA Sequence
gataactgaaatcctgagccatacg

SEQ ID NO: 1342 - DNA, 24 bp, Artificial Sequence
  Synthetic DNA Sequence
gatgttattggtcaatatcatcca

SEQ ID NO: 1343 - DNA, 29 bp, Artificial Sequence
  Synthetic DNA Sequence
aagaaactgtctctttattaatatcacgt

SEQ ID NO: 1344 - DNA, 24 bp, Artificial Sequence
  Synthetic DNA Sequence
agcagcaacgatgttacgcagcag

SEQ ID NO: 1345 - DNA, 23 bp, Artificial Sequence
  Synthetic DNA Sequence
cccgccgagcatttcaactattg

SEQ ID NO: 1346 - DNA, 22 bp, Artificial Sequence
  Synthetic DNA Sequence
gatgttacgcagcagggcagtc

SEQ ID NO: 1347 - DNA, 24 bp, Artificial Sequence
  Synthetic DNA Sequence
accaagcaggttcgcagtcaagta

SEQ ID NO: 1348 - DNA, 750 bp, Unknown Organism
  Description of Unknown Organism: Unidentified bacterium
atgcgctcacgcaactggtccagaaccttgaccgaacgcagcggtggtaacggcgcagtggcggttttcatggcttgttatgactgtttttttgtacagtctatgcctcgggcatccaagcagcaagcgcgttacgccgtgggtcgatgtttgatgttatggagcagcaacgatgttacgcagcagggcagtcgccctaaaacaaagttaggccgcatggacacaacgcaggtcacattgatacacaaaattctagctgcggcagatgagcgaaatctgccgctctggatcggtgggggctgggcgatcgatgcacggctagggcgtgtaacacgcaagcacgatgatattgatctgacgtttcccggcgagaggcgcggcgagctcgaggcaatagttgaaatgctcggcgggcgcgtcatggaggagttggactatggattcttagcggagatcggggatgagttacttgactgcgaacctgcttggtgggcagacgaagcgtatgaaatcgcggaggctccgcagggctcgtgcccagaggcggctgagggcgtcatcgccgggcggccagtccgttgtaacagctgggaggcgatcatctgggattacttttactatgccgatgaagtaccaccagtggactggcctacaaagcacatagagtcctacaggctcgcatgcacctcactcggggcggaaaaggttgaggtcttgcgtgccgctttcaggtcgcgatatgcggcctaa

SEQ ID NO: 1349 - DNA, 24 bp, Artificial Sequence
  Synthetic DNA Sequence
cagccgaccaatgagtatcttgcc

SEQ ID NO: 1350 - DNA, 24 bp, Artificial Sequence
  Synthetic DNA Sequence
taatcagggcagttgcgactccta

SEQ ID NO: 1351 - DNA, 531 bp, Pseudomonas aeruginosa strain Stone 130
atgttatggagcagcaacgatgttacgcagcagggcagtcgccctaaaacaaagttaggtggctcaatgagcatcattgcaaccgtcaagatcggccctgacgaaatttcagccatgagggctgtgctcgatctcttcggcaaagagtttgaggacattccaacctactctgatcgccagccgaccaatgagtatcttgccaatcttctgcacagcgagacgttcatcgcgctcgctgcttttgaccgcggaacagcaataggtgggctcgccgcctacgttctacccaagttcgagcaagcgcgaagcgagatctacatttatgacttggcagtcgcttccagccatcgaaggctaggagtcgcaactgccctgattagccacctgaagcgtgtggcggttgaacttggcgcgtatgtaatctatgtgcaagcagactacggtgacgatccggcagtcgctctctacacaaagcttggagttcgggaagacgtcatgcacttcgacattgatccaagaaccgccacctaa

SEQ ID NO: 1352 - DNA, 22 bp, Artificial Sequence
  Synthetic DNA Sequence
ccacgctgacagagccgcaccg

SEQ ID NO: 1353 - DNA, 22 bp, Artificial Sequence
  Synthetic DNA Sequence
ggccagctcccatcggaccctg

SEQ ID NO: 1354 - DNA, 21 bp, Artificial Sequence
  Synthetic DNA Sequence
cacgctgacagagccgcaccg

SEQ ID NO: 1355 - DNA, 24 bp, Artificial Sequence
  Synthetic DNA Sequence
atgccgttgctgtcgaaatcctcg

SEQ ID NO: 1356 - DNA, 810 bp, Serratia marcescens
atgaacacgatcgaatcgatcacggcggacctgcacggactgggcgtccggcccggcgacctgatcatggtccatgcatcgctgaaagccgtcggcccggtcgagggaggtgcggcctcggtggtgtcggcccttcgcgccgcggtcgggtccgcagggaccctgatgggttatgcctcatgggaccgctcgccctatgaggagacgctgaacggcgcgcggatggacgaagaactgcgccgccggtggccacccttcgatctggccacatccggtacctatcccggcttcggcctgctcaaccggtttctgcttgaggcgcccgacgcacggcgcagcgcgcatcccgacgcctccatggtcgcggtcggcccccttgccgccacgctgacagagccgcaccggcttgggcaggcgctgggcgaaggctcgccgctggagcgcttcgtcgggcatggcggaaaggtcctgcttctgggagcgccgctcgactccgtcaccgtgctgcattacgccgaggccatcgcccccatcccgaacaaacgccgcgtgacctatgaaatgccgatgctcggcccggatggcagggtccgatgggagctggccgaggatttcgacagcaacggcattctcgattgcttcgcggtcgatgggaagccggatgccgtcgagacgatcgccaaggcttatgtcgaactgggccggcatcgggaaggcatcgtcggtcgcgcaccctcctatctgtttgaagcgcaggatatcgtctcgttcggcgtcacctatctcgaacagcatttcggcgcgccctga

SEQ ID NO: 1357 - DNA, 20 bp, Artificial Sequence
  Synthetic DNA Sequence
gcccatccatttgcctttgc

SEQ ID NO: 1358 - DNA, 24 bp, Artificial Sequence
  Synthetic DNA Sequence
gcgtaccaacttgccatcctgaag

SEQ ID NO: 1359 - DNA, 19 bp, Artificial Sequence
  Synthetic DNA Sequence
tgcccctgccacctcactc

SEQ ID NO: 1360 - DNA, 24 bp, Artificial Sequence
  Synthetic DNA Sequence
cgtaccaacttgccatcctgaaga

SEQ ID NO: 1361 - DNA, 786 bp, Escherichia coli
gtgcaatacgaatggcgaaaagccgagctcatcggtcagcttctcaaccttggggttacccccggcggtgtgctgctggtccacagctccttccgtagcgtccggcccctcgaagatgggccacttggactgatcgaggccctgcgtgctgcgctgggtccgggagggacgctcgtcatgccctcgtggtcaggtctggacgacgagccgttcgatcctgccacgtcgcccgttacaccggaccttggagttgtctctgacacattctggcgcctgccaaatgtaaagcgcagcgcccatccatttgcctttgcggcagcggggccacaggcagagcagatcatctctgatccattgcccctgccacctcactcgcctgcaagcccggtcgcccgtgtccatgaactcgatgggcaggtacttctcctcggcgtgggacacgatgccaacacgacgctgcatcttgccgagttgatggcaaaggttccctatggggtgccgagacactgcaccattcttcaggatggcaagttggtacgcgtcgattatctcgagaatgaccactgctgtgagcgctttgccttggcggacaggtggctcaaggagaagagccttcagaaggaaggtccagtcggtcatgcctttgctcggttgatccgctcccgcgacattgtggcgacagccctgggtcaactgggccgagatccgttgatcttcctgcatccgccagagggcgggatgcgaagaatgcgatgccgctcgccagtcgattggctgagctcatga

SEQ ID NO: 1362 - DNA, 22 bp, Artificial Sequence
  Synthetic DNA Sequence
cgccgccatcgcccaaagctgg

SEQ ID NO: 1363 - DNA, 24 bp, Artificial Sequence
  Synthetic DNA Sequence
cggcataatggagcgcggtgactg

SEQ ID NO: 1364 - DNA, 24 bp, Artificial Sequence
  Synthetic DNA Sequence
tttctcgcccacgcaggaaaaatc

SEQ ID NO: 1365 - DNA, 22 bp, Artificial Sequence
  Synthetic DNA Sequence
catcctcgacgaatatgccgcg

SEQ ID NO: 1366 - DNA, 900 bp, Enterobacter cloacae
atgactgatccccgcaaaaacggcgatttgcacgaacccgcgacggcacccgcgacgccctggtccaaaagcgagctggtccggcaattgcgcgacctcggcgtgcgctcaggcgatatggtgatgccgcatgtgtcgttgcgcgccgtcgggccgctggcggacggaccgcagacacttgtcgatgcgctgatcgaggccgtcggccccaccgggaatattctcgccttcgtctcgtggcgcgattcgccctatgaacagacgctgggtcatgatgcgccgcccgccgccatcgcccaaagctggcctgcgttcgaccccgaccatgcgcccgcctaccccggctttggcgcgatcaacgaatttatccgaacctatccggggtgtcggcgcacggcccatcccgacgcatcgatggcggcgatcgggcccgatgcggcgtggctggtggcgccgcacgagatgggcgccgcttatggcccccgctcgccgatcgcgcgttttctcgcccacgcaggaaaaatcctgtcgatcggcgccgggcccgatgcagtcaccgcgctccattatgccgaagcggtggcgcggatcgagggcaagcgccgcgtcacttattcgatgcccttactgcgcgaaggcaagcgcgtctgggtcaccacgtccgactgggattcgaacggcatcctcgacgaatatgccgcgcccgacggccccgacgcggtcgaacggatcgcccgcgactatctcgcccgcaccagggttgcgcaaggcccggtcggcggcgcgcaatcccggctgatcgacgcggccgatatcgtttccttcggcatcgaatggctcgaggcgcgccacgccgcgccagcggcggcagcgctgaagccgaaacaacgccgcgactga

SEQ ID NO: 1367 - DNA, 24 bp, Artificial Sequence
  Synthetic DNA Sequence
caaatatactaacagaagcgttca

SEQ ID NO: 1368 - DNA, 22 bp, Artificial Sequence
  Synthetic DNA Sequence
aggatcttgccaatacctttat

SEQ ID NO: 1369 - DNA, 24 bp, Artificial Sequence
  Synthetic DNA Sequence
aaacctttgtttcggtctgctaat

SEQ ID NO: 1370 - DNA, 24 bp, Artificial Sequence
  Synthetic DNA Sequence
aagcgattccaataataccttgct

SEQ ID NO: 1371 - DNA, 558 bp, Citrobacter diversus
atgaattatcaaattgtgaatattgcggaatgcagcaattatcagttagaagcagcaaatatactaacagaagcgttcaatgatcttggtaacaattcatggccagatatgacgagtgcaacaaaagaagtaaaagaatgtattgagagtccaaacctttgtttcggtctgctaataaataactccttagttggctggataggcttaaggccaatgtacaaggaaacctgggaattgcatccattggttgtcagaccagattatcaaaataaaggtattggcaagatcctgcttaaggaattagaaaacagagctagagagcaaggtattattggaatcgctttaggaacagatgatgaatactatagaacaagtctctctttaataactataacagaagataatatatttgattcaataaaaaatattaaaaatattaataaacatccatatgagttttatcagaagaatggttattatattgttggaataattccaaatgccaatggtaaaaacaaaccagatatttggatgtggaaaagtttaatcaaagagtaa

SEQ ID NO: 1372 - DNA, 24 bp, Artificial Sequence
  Synthetic DNA Sequence
gctttcgttgcctttgccgaggtc

SEQ ID NO: 1373 - DNA, 23 bp, Artificial Sequence
  Synthetic DNA Sequence
cacccctgttgcttcgcccactc

SEQ ID NO: 1374 - DNA, 24 bp, Artificial Sequence
  Synthetic DNA Sequence
agatattggcttcgccgcaccaca

SEQ ID NO: 1375 - DNA, 23 bp, Artificial Sequence
  Synthetic DNA Sequence
ccctgttgcttcgcccactcctg

SEQ ID NO: 1376 - DNA, 441 bp, Serratia marcescens
atgatcgtcatctgcgaccacgacaacctcgacgcctggctggcgctgcgcaccgcgctgtggccctccggctcgcctgaagatcaccgcgcggaaatgcgcgagatattggcttcgccgcaccacaccgcgtttatggcgcgggggctggacggcgctttcgttgcctttgccgaggtcgcgctgcgctacgattacgtcaacggctgcgaatcgtcgccggtggcgtttttggaaggaatttataccgccgaacgcgcccgccgccagggctgggccgcgcgcctgatcgcgcaggtgcaggagtgggcgaagcaacaggggtgcagcgagctggcgtcggataccgatatcgccaatctggactcccagcgcctgcatgcggcgctgggctttgccgaaacggagcgagtagtgttttaccgcaaaacgctgggctga

SEQ ID NO: 1377 - DNA, 24 bp, Artificial Sequence
  Synthetic DNA Sequence
gccgtgggtcgatgtttgatgtta

SEQ ID NO: 1378 - DNA, 24 bp, Artificial Sequence
  Synthetic DNA Sequence
gctcgatgacgccaactacctctg

SEQ ID NO: 1379 - DNA, 24 bp, Artificial Sequence
  Synthetic DNA Sequence
agcagcaacgatgttacgcagcag

SEQ ID NO: 1380 - DNA, 24 bp, Artificial Sequence
  Synthetic DNA Sequence
cgctcgatgacgccaactacctct

SEQ ID NO: 1381 - DNA, 972 bp, Escherichia coli
gtggtaacggcgcagtggcggttttcatggcttcttgttatgacatgtttttttggggtacagtctatgcctcgggcatccaagcagcaagcgcgttacgccgtgggtcgatgtttgatgttatggagcagcaacgatgttacgcagcagggcagtcgccctaaaacaaagttaaacatcatgagggaagcggtgatcgccgaagtatcgactcaactatcagaggtagttggcgtcatcgagcgccatctcgaaccgacgttgctggccgtacatttgtacggctccgcagtggatggcggcctgaagccacacagtgatattgatttgctggttacggtgaccgtaaggcttgatgaaacaacgcggcgagctttgatcaacgaccttttggaaacttcggcttcccctggagagagcgagattctccgcgctgtagaagtcaccattgttgtgcacgacgacatcattccgtggcgttatccagctaagcgcgaactgcaatttggagaatggcagcgcaatgacattcttgcaggtatcttcgagccagccacgatcgacattgatctggctatcttgctgacaaaagcaagagaacatagcgttgccttggtaggtccagcggcggaggaactctttgatccggttcctgaacaggatctatttgaggcgctaaatgaaaccttaacgctatggaactcgccgcccgactgggctggcgatgagcgaaatgtagtgcttacgttgtcccgcatttggtacagcgcagtaaccggcaaaatcgcgccgaaggatgtcgctgccgactgggcaatggagcgcctgccggcccagtatcagcccgtcatacttgaagctagacaggcttatcttggacaagaagaagatcgcttggcctcgcgcgcagatcagttggaagaatttgtccactacgtgaaaggcgagatcaccaaggtagtcggcaaataa

SEQ ID NO: 1382 - DNA, 24 bp, Artificial Sequence
  Synthetic DNA Sequence
tagatatgataggcggtaaaaagc

SEQ ID NO: 1383 - DNA, 23 bp, Artificial Sequence
  Synthetic DNA Sequence
cccaaattcgagtaagaggtatt

SEQ ID NO: 1384 - DNA, 22 bp, Artificial Sequence
  Synthetic DNA Sequence
gatatgataggcggtaaaaagc

SEQ ID NO: 1385 - DNA, 22 bp, Artificial Sequence
  Synthetic DNA Sequence
tcccaaattcgagtaagaggta

SEQ ID NO: 1386 - DNA, 477 bp, Staphylococcus aureus
atgaaagaaagatatggaacagtatataaaggctctcagaggctcatagacgaggaaagtggagaagtaatagaggtagataagctataccgtaaacaaacgtctggtaactttgtaaaagcgtatatcgtccaattaataagtatgttagatatgataggcggtaaaaagctcaagattgttaattatatattagataatgtacatctaagtaataacacaatgatagcaactgttagagaaatagcagaaggaacaaatacaagcacgaaaaccgtaaatacaacgcttaaaatcttagaagaaggaaatatcattaaaagaagaactggagcattaatgctaaacccagagctactcatgagaggcgatgaccaaaaacaaaaatacctcttactcgaatttgggaactttgagcaagaggacgaccaaaagcaagaaaatgctttatcagaatattattctttcaaggagtag

SEQ ID NO: 1387 - DNA, 24 bp, Artificial Sequence
  Synthetic DNA Sequence
ttatgcctcttccgaccatcaagc

SEQ ID NO: 1388 - DNA, 24 bp, Artificial Sequence
  Synthetic DNA Sequence
tacgctcgtcatcaaaatcactcg

SEQ ID NO: 1389 - DNA, 24 bp, Artificial Sequence
  Synthetic DNA Sequence
gaataacggtttggttgatgcgag

SEQ ID NO: 1390 - DNA, 24 bp, Artificial Sequence
  Synthetic DNA Sequence
atggcaagatcctggtatcggtct

SEQ ID NO: 1391 - DNA, 816 bp, Escherichia coli
atgagccatattcaacgggaaacgtcttgctcgaggccgcgattaaattccaacatggatgctgatttatatgggtataaatgggctcgcgataatgtcgggcaatcaggtgcgacaatctatcgattgtatgggaagcccgatgcgccagagttgtttctgaaacatggcaaaggtagcgttgccaatgatgttacagatgagatggtcagactaaactggctgacggaatttatgcctcttccgaccatcaagcattttatccgtactcctgatgatgcatggttactcaccactgcgatccccgggaaaacagcattccaggtattagaagaatatcctgattcaggtgaaaatattgttgatgcgctggcagtgttcctgcgccggttgcattcgattcctgtttgtaattgtccttttaacagcgatcgcgtatttcgtctcgctcaggcgcaatcacgaatgaataacggtttggttgatgcgagtgattttgatgacgagcgtaatggctggcctgttgaacaagtctggaaagaaatgcataagcttttgccattctcaccggattcagtcgtcactcatggtgatttctcacttgataaccttatttttgacgaggggaaattaataggttgtattgatgttggacgagtcggaatcgcagaccgataccaggatcttgccatcctatggaactgcctcggtgagttttctccttcattacagaaacggctttttcaaaaatatggtattgataatcctgatatgaataaattgcagtttcatttgatgctcgatgagtttttctaa

SEQ ID NO: 1392 - DNA, 24 bp, Artificial Sequence
  Synthetic DNA Sequence
tgggtggagaggctattcggctat

SEQ ID NO: 1393 - DNA, 23 bp, Artificial Sequence
  Synthetic DNA Sequence
cagtcccttcccgcttcagtgac

SEQ ID NO: 1394 - DNA, 24 bp, Artificial Sequence
  Synthetic DNA Sequence
gacgttgtcactgaagcgggaagg

SEQ ID NO: 1395 - DNA, 24 bp, Artificial Sequence
  Synthetic DNA Sequence
cttggtggtcgaatgggcaggtag

SEQ ID NO: 1396 - DNA, 795 bp, Escherichia coli
atgattgaacaagatggattgcacgcaggttctccggccgcttgggtggagaggctattcggctatgactgggcacaacagacaatcggctgctctgatgccgccgtgttccggctgtcagcgcaggggcgcccggttctttttgtcaagaccgacctgtccggtgccctgaatgaactgcaggacgaggcagcgcggctatcgtggctggccacgacgggcgttccttgcgcagctgtgctcgacgttgtcactgaagcgggaagggactggctgctattgggcgaagtgccggggcaggatctcctgtcatctcaccttgctcctgccgagaaagtatccatcatggctgatgcaatgcggcggctgcatacgcttgatccggctacctgcccattcgaccaccaagcgaaacatcgcatcgagcgagcacgtactcggatggaagccggtcttgtcgatcaggatgatctggacgaagagcatcaggggctcgcgccagccgaactgttcgccaggctcaaggcgcgcatgcccgacggcgaggatctcgtcgtgacccatggcgatgcctgcttgccgaatatcatggtggaaaatggccgcttttctggattcatcgactgtggccggctgggtgtggcggaccgctatcaggacatagcgttggctacccgtgatattgctgaagagcttggcggcgaatgggctgaccgcttcctcgtgctttacggtatcgccgctcccgattcgcagcgcatcgccttctatcgccttcttgacgagttcttctga

SEQ ID NO: 1397 - DNA, 22 bp, Artificial Sequence
  Synthetic DNA Sequence
gtgggagaaaatgaaaacctat

SEQ ID NO: 1398 - DNA, 20 bp, Artificial Sequence
  Synthetic DNA Sequence
atggagtgaaagagcctgat

SEQ ID NO: 1399 - DNA, 24 bp, Artificial Sequence
  Synthetic DNA Sequence
acctatgatgtggaacgggaaaag

SEQ ID NO: 1400 - DNA, 23 bp, Artificial Sequence
  Synthetic DNA Sequence
cgatggagtgaaagagcctgatg

SEQ ID NO: 1401 - DNA, 795 bp, Enterococcus faecalis
atggctaaaatgagaatatcaccggaattgaaaaaactgatcgaaaaataccgctgcgtaaaagatacggaaggaatgtctcctgctaaggtatataagctggtgggagaaaatgaaaacctatatttaaaaatgacggacagccggtataaagggaccacctatgatgtggaacgggaaaaggacatgatgctatggctggaaggaaagctgcctgttccaaaggtcctgcactttgaacggcatgatggctggagcaatctgctcatgagtgaggccgatggcgtcctttgctcggaagagtatgaagatgaacaaagccctgaaaagattatcgagctgtatgcggagtgcatcaggctctttcactccatcgacatatcggattgtccctatacgaatagcttagacagccgcttagccgaattggattacttactgaataacgatctggccgatgtggattgcgaaaactgggaagaagacactccatttaaagatccgcgcgagctgtatgattttttaaagacggaaaagcccgaagaggaacttgtcttttcccacggcgacctgggagacagcaacatctttgtgaaagatggcaaagtaagtggctttattgatcttgggagaagcggcagggcggacaagtggtatgacattgccttctgcgtccggtcgatcagggaggatatcggggaagaacagtatgtcgagctattttttgacttactggggatcaagcctgattgggagaaaataaaatattatattttactggatgaattgttttag

SEQ ID NO: 1402 - DNA, 24 bp, Artificial Sequence
  Synthetic DNA Sequence
tattcaacaatttatcggaaacag

SEQ ID NO: 1403 - DNA, 23 bp, Artificial Sequence
  Synthetic DNA Sequence
tcagagagccaactcaacatttt

SEQ ID NO: 1404 - DNA, 24 bp, Artificial Sequence
  Synthetic DNA Sequence
aaacagcgttttagagccaaataa

SEQ ID NO: 1405 - DNA, 24 bp, Artificial Sequence
  Synthetic DNA Sequence
ttctcagagagccaactcaacatt

SEQ ID NO: 1406 - DNA, 780 bp, Acinetobacter baumannii strain BM2580
atggaattgcccaatattattcaacaatttatcggaaacagcgttttagagccaaataaaattggtcagtcgccatcggatgtttattcttttaatcgaaataatgaaactttttttcttaagcgatctagcactttatatacagagaccacatacagtgtctctcgtgaagcgaaaatgttgagttggctctctgagaaattaaaggtgcctgaactcatcatgacttttcaggatgagcagtttgaattcatgatcactaaagcgatcaatgcaaaaccaatttcagcgctttttttaacagaccaagaattgcttgctatctataaggaggcactcaatctgttaaattcaattgctattattgattgtccatttatttcaaacattgatcatcggttaaaagagtcaaaattttttattgataaccaactccttgacgatatagatcaagatgattttgacactgaattatggggagaccataaaacttacctaagtctatggaatgagttaaccgagactcgtgttgaagaaagattggttttttctcatggcgatatcacggatagtaatatttttatagataaattcaatgaaatttattttttagatcttggtcgtgctgggttagcagatgaatttgtagatatatcctttgttgaacgttgcctaagagaggatgcatcggaggaaactgcgaaaatatttttaaagcatttaaaaaatgatagacctgacaaaaggaattattttttaaaacttgatgaattgaattga

SEQ ID NO: 1407 - DNA, 24 bp, Artificial Sequence
  Synthetic DNA Sequence
ccctgtaatagaaaagcaagtagg

SEQ ID NO: 1408 - DNA, 22 bp, Artificial Sequence
  Synthetic DNA Sequence
ttgtcgtatccctcaaatcacc

SEQ ID NO: 1409 - DNA, 23 bp, Artificial Sequence
  Synthetic DNA Sequence
tgggattacaatggcaatcagcg

SEQ ID NO: 1410 - DNA, 25 bp, Artificial Sequence
  Synthetic DNA Sequence
ggggaataggtcacaagatctgctt

SEQ ID NO: 1411 - DNA, 912 bp, Pseudomonas aeruginosa
atgcttttatataaaatgtgtgacaatcaaaattatggggttacttacatgaagtttttattggcattttcgcttttaataccatccgtggtttttgcaagtagttcaaagtttcagcaagttgaacaagacgttaaggcaattgaagtttctctttctgctcgtataggtgtttccgttcttgatactcaaaatggagaatattgggattacaatggcaatcagcgcttcccgttaacaagtacttttaaaacaatagcttgcgctaaattactatatgatgctgagcaaggaaaagttaatcccaatagtacagtcgagattaagaaagcagatcttgtgacctattcccctgtaatagaaaagcaagtagggcaggcaatcacactcgatgatgcgtgcttcgcaactatgactacaagtgataatactgcggcaaatatcatcctaagtgctgtaggtggccccaaaggcgttactgattttttaagacaaattggggacaaagagactcgtctagaccgtattgagcctgatttaaatgaaggtaagctcggtgatttgagggatacgacaactcctaaggcaatagccagtactttgaataaacttttatttggttccgcgctatctgaaatgaaccagaaaaaattagagtcttggatggtgaacaatcaagtcactggtaatttactacgttcagtattgccggcgggatggaacattgcggatcgctcaggtgctggcggatttggtgctcggagtattacagcagttgtgtggagtgagcatcaagccccaattattgtgagcatctatctagctcaaacacaggcttcaatggcagagcgaaatgatgcgattgttaaaattggtcattcaatttttgacgtttatacatcacagtcgcgc

SEQ ID NO: 1412 - DNA, 21 bp, Artificial Sequence
  Synthetic DNA Sequence
gagaaaacgctccagcagggc

SEQ ID NO: 1413 - DNA, 21 bp, Artificial Sequence
  Synthetic DNA Sequence
catgaggctttcactgcgggg

SEQ ID NO: 1414 - DNA, 21 bp, Artificial Sequence
  Synthetic DNA Sequence
tatcgttaatcgcaccatcac

SEQ ID NO: 1415 - DNA, 21 bp, Artificial Sequence
  Synthetic DNA Sequence
atgcagtaatgcggctttatc

SEQ ID NO: 1416 - DNA, 1146 bp, Klebsiella pneumoniae strain HEL-1
atgatgaaaaaatcgttatgctgcgctctgctgctgacagcctctttctccacatttgctgccgcaaaaacagaacaacagattgccgatatcgttaatcgcaccatcaccccgttgatgcaggagcaggctattccgggtatggccgttgccgttatctaccagggaaaaccctattatttcacctggggtaaagccgatatcgccaataaccacccagtcacgcagcaaacgctgtttgagctaggatcggttagtaagacgtttaacggcgtgttgggcggcgatgctatcgcccgcggcgaaattaagctcagcgatccggtcacgaaatactggccagaactgacaggcaaacagtggcagggtatccgcctgctgcacttagccacctatacggcaggcggcctaccgctgcagatccccgatgacgttagggataaagccgcattactgcatttttatcaaaactggcagccgcaatggactccgggcgctaagcgactttacgctaactccagcattggtctgtttggcgcgctggcggtgaaaccctcaggaatgagttacgaagaggcaatgaccagacgcgtcctgcaaccattaaaactggcgcatacctggattacggttccgcagaacgaacaaaaagattatgcctggggctatcgcgaagggaagcccgtacacgtttctccgggacaacttgacgccgaagcctatggcgtgaaatccagcgttattgatatggcccgctgggttcaggccaacatggatgccagccacgttcaggagaaaacgctccagcagggcattgcgcttgcgcagtctcgctactggcgtattggcgatatgtaccagggattaggctgggagatgctgaactggccgctgaaagctgattcgatcatcaacggcagcgacagcaaagtggcattggcagcgcttcccgccgttgaggtaaacccgcccgcccccgcagtgaaagcctcatgggtgcataaaacgggctccactggtggatttggcagctacgtagccttcgttccagaaaaaaaccttggcatcgtgatgctggcaaacaaaagctatcctaaccctgtccgtgtcgaggcggcctggcgcattcttgaaaagctgcaataa

SEQ ID NO: 1417 - DNA, 25 bp, Artificial Sequence
  Synthetic DNA Sequence
tggttaactayaatccsattgcgga

SEQ ID NO: 1418 - DNA, 22 bp, Artificial Sequence
  Synthetic DNA Sequence
atgctttacccagcgtcagatt

SEQ ID NO: 1419 - DNA, 24 bp, Artificial Sequence
  Synthetic DNA Sequence
cgatgaataagctgatttctcacg

SEQ ID NO: 1420 - DNA, 24 bp, Artificial Sequence
  Synthetic DNA Sequence
tgctttacccagcgtcagattacg

SEQ ID NO: 1421 - DNA, 24 bp, Artificial Sequence
  Synthetic DNA Sequence
aattagagcggcagtcgggaggaa

SEQ ID NO: 1422 - DNA, 24 bp, Artificial Sequence
  Synthetic DNA Sequence
gaaatcagcttattcatcgccacg

SEQ ID NO: 1423 - DNA, 876 bp, Escherichia coli strain GRI-1
atggttaaaaaatcactgcgtcagttcacgctgatggcgacggcaaccgtcacgctgttgttaggaagtgtgccgctgtatgcgcaaacggcggacgtacagcaaaaacttgccgaattagagcggcagtcgggaggaagactgggtgtggcattgattaacacagcagataattcgcaaatactttatcgtgctgatgagcgctttgcgatgtgcagcaccagtaaagtgatggccgtggccgcggtgctgaagaaaagtgaaagcgaaccgaatctgttaaatcagcgagttgagatcaaaaaatctgacttggttaactataatccgattgcggaaaagcacgtcgatgggacgatgtcactggctgagcttagcgcggccgcgctacagtacagcgataacgtggcgatgaataagctgatttctcacgttggcggcccggctagcgtcaccgcgttcgcccgacagctgggagacgaaacgttccgtctcgaccgtaccgagccgacgttaaacaccgccattccgggcgatccgcgtgataccacttcacctcgggcaatggcgcaaactctgcgtaatctgacgctgggtaaagcattgggtgacagccaacgggcgcagctggtgacatggatgaaaggcaataccaccggtgcagcgagcattcaggctggactgcctgcttcctgggttgtgggggataaaaccggcagcggtgactatggcaccaccaacgatatcgcggtgatctggccaaaagatcgtgcgccgctgattctggtcacttacttcacccagcctcaacctaaggcagaaagccgtcgcgatgtattagcgtcggcggctaaaatcgtcaccaacggtttgtaa

SEQ ID NO: 1424 - DNA, 23 bp, Artificial Sequence
  Synthetic DNA Sequence
gttaacggtgatggcgacgctac

SEQ ID NO: 1425 - DNA, 24 bp, Artificial Sequence
  Synthetic DNA Sequence
gaattatcggcggtgttaatcagc

SEQ ID NO: 1426 - DNA, 22 bp, Artificial Sequence
  Synthetic DNA Sequence
cacgctcaataccgccattcca

SEQ ID NO: 1427 - DNA, 24 bp, Artificial Sequence
  Synthetic DNA Sequence
ttatcgcccactacccatgatttc

SEQ ID NO: 1428 - DNA, 876 bp, Salmonella typhimurium strain CAS-5
atgatgactcagagcattcgccgctcaatgttaacggtgatggcgacgctacccctgctatttagcagcgcaacgctgcatgcgcaggcgaacagcgtgcaacagcagctggaagccctggagaaaagttcgggaggtcggcttggcgttgcgctgattaacaccgccgataattcgcagattctctaccgtgccgatgaacgttttgcgatgtgcagtaccagtaaggtgatggcggccgcggcggtgcttaaacagagcgagagcgataagcacctgctaaatcagcgcgttgaaatcaagaagagcgacctggttaactacaatcccattgcggagaaacacgttaacggcacgatgacgctggctgagcttggcgcagcggcgctgcagtatagcgacaatactgccatgaataagctgattgcccatctgggtggtcccgataaagtgacggcgtttgctcgctcgttgggtgatgagaccttccgtctggacagaaccgagcccacgctcaataccgccattccaggcgacccgcgtgataccaccacgccgctcgcgatggcgcagaccctgaaaaatctgacgctgggtaaagcgctggcggaaactcagcgggcacagttggtgacgtggcttaagggcaatactaccggtagcgcgagcattcgggcgggtctgccgaaatcatgggtagtgggcgataaaaccggcagcggagattatggcaccaccaacgatatcgcggttatctggccggaaaaccacgcaccgctggttctggtgacctactttacccaaccggagcagaaggcggaaagccgtcgggatattctggctgcggcggcgaaaatcgtaacccacggtttctga

SEQ ID NO: 1429 - DNA, 25 bp, Artificial Sequence
  Synthetic DNA Sequence
tttacggctaaagatactgaaaagt

SEQ ID NO: 1430 - DNA, 26 bp, Artificial Sequence
  Synthetic DNA Sequence
gtttaataaaacaaccaccgaataat

SEQ ID NO: 1431 - DNA, 25 bp, Artificial Sequence
  Synthetic DNA Sequence
taattgacactccatttacggctaa

SEQ ID NO: 1432 - DNA, 26 bp, Artificial Sequence
  Synthetic DNA Sequence
accgaataatattttcctttcaggca

SEQ ID NO: 1433 - DNA, 741 bp, Pseudomonas aeruginosa
atgagcaagttatctgtattctttatatttttgttttgcagcattgctaccgcagcagagtctttgccagatttaaaaattgaaaagcttgatgaaggcgtttatgttcatacttcgtttgaagaagttaacgggtggggcgttgttcctaaacatggtttggtggttcttgtaaatgctgaggcttacctaattgacactccatttacggctaaagatactgaaaagttagtcacttggtttgtggagcgtggctataaaataaaaggcagcatttcctctcattttcatagcgacagcacgggcggaatagagtggcttaattctcgatctatccccacgtatgcatctgaattaacaaatgaactgcttaaaaaagacggtaaggttcaagccacaaattcatttagcggagttaactattggctagttaaaaataaaattgaagttttttatccaggcccgggacacactccagataacgtagtggtttggttgcctgaaaggaaaatattattcggtggttgttttattaaaccgtacggtttaggcaatttgggtgacgcaaatatagaagcttggccaaagtccgccaaattattaaagtccaaatatggtaaggcaaaactggttgttccaagtcacagtgaagttggagacgcatcactcttgaaacttacattagagcaggcggttaaagggttaaacgaaagtaaaaaaccatcaaaaccaagcaactaa

SEQ ID NO: 1434 - DNA, 25 bp, Artificial Sequence
  Synthetic DNA Sequence
cacaatcaagaccaagatttgcgat

SEQ ID NO: 1435 - DNA, 25 bp, Artificial Sequence
  Synthetic DNA Sequence
gaaagggcagctcgttacgatagag

SEQ ID NO: 1436 - DNA, 24 bp, Artificial Sequence
  Synthetic DNA Sequence
cagcatcaacatttaagatcccca

SEQ ID NO: 1437 - DNA, 26 bp, Artificial Sequence
  Synthetic DNA Sequence
ctccacttgattaactgcggaaattc

SEQ ID NO: 1438 - DNA, 828 bp, Escherichia coli
atggcaatccgaatcttcgcgatacttttctccattttttctcttgccactttcgcgcatgcgcaagaaggcacgctagaacgttctgactggaggaagtttttcagcgaatttcaagccaaaggcacgatagttgtggcagacgaacgccaagcggatcgtgccatgttggtttttgatcctgtgcgatcgaagaaacgctactcgcctgcatcgacattcaagatacctcatacactttttgcacttgatgcaggcgctgttcgtgatgagttccagatttttcgatgggacggcgttaacaggggctttgcaggccacaatcaagaccaagatttgcgatcagcaatgcggaattctactgtttgggtgtatgagctatttgcaaaggaaattggtgatgacaaagctcggcgctatttgaagaaaatcgactatggcaacgccgatccttcgacaagtaatggcgattactggatagaaggcagccttgcaatctcggcgcaggagcaaattgcatttctcaggaagctctatcgtaacgagctgccctttcgggtagaacatcagcgcttggtcaaggatctcatgattgtggaagccggtcgcaactggatactgcgtgcaaagacgggctgggaaggccgtatgggttggtgggtaggatgggttgagtggccgactggctccgtattcttcgcactgaatattgatacgccaaacagaatggatgatcttttcaagagggaggcaatcgtgcgggcaatccttcgctctattgaagcgttaccgcccaacccggcagtcaactcggacgctgcgcgataa

SEQ ID NO: 1439 - DNA, 801 bp, Pseudomonas aeruginosa
atgaaaacatttgccgcatatgtaattatcgcgtgtctttcgagtacggcattagctggttcaattacagaaaatacgtcttggaacaaagagttctctgccgaagccgtcaatggtgtcttcgtgctttgtaaaagtagcagtaaatcctgcgctaccaatgacttagctcgtgcatcaaaggaatatcttccagcatcaacatttaagatccccaacgcaattatcggcctagaaactggtgtcataaagaatgagcatcaggttttcaaatgggacggaaagccaagagccatgaagcaatgggaaagagacttgaccttaagaggggcaatacaagtttcagctgttcccgtatttcaacaaatcgccagagaagttggcgaagtaagaatgcagaaataccttaaaaaattttcctatggcaaccagaatatcagtggtggcattgacaaattctggttggaaggccagcttagaatttccgcagttaatcaagtggagtttctagagtctctatatttaaataaattgtcagcatctaaagaaaaccagctaatagtaaaagaggctttggtaacggaggcggcacctgaatatctagtgcattcaaaaactggtttttctggtgtgggaactgagtcaaatcctggtgtcgcatggtgggttgggtgggttgagaaggagacagaggtttactttttcgcctttaacatggatatagacaacgaaagtaagttgccgctaagaaaatccattcccaccaaaatcatggaaagtgagggcatcattggtggctaa

SEQ ID NO: 1440 - DNA, 26 bp, Artificial Sequence
  Synthetic DNA Sequence
agaccgttatcgtaaacagggctaag

SEQ ID NO: 1441 - DNA, 26 bp, Artificial Sequence
  Synthetic DNA Sequence
ttttttgctcaaactttttcaggatc

SEQ ID NO: 1442 - DNA, 927 bp, Pseudomonas aeruginosa strain RNL-1
atgaatgtcattataaaagctgtagttactgcctcgacgctactgatggtatcttttagttcattcgaaacctcagcgcaatccccactgttaaaagagcaaattgaatccatagtcattggaaaaaaagccactgtaggcgttgcagtgtgggggcctgacgatctggaacctttactgattaatccttttgaaaaattcccaatgcaaagtgtatttaaattgcatttagctatgttggtactgcatcaggttgatcagggaaagttggatttaaatcagaccgttatcgtaaacagggctaaggttttacagaatacctgggctccgataatgaaagcgtatcagggagacgagtttagtgttccagtgcagcaactgctgcaatactcggtctcgcacagcgataacgtggcctgtgatttgttatttgaactggttggtggaccagctgctttgcatgactatatccagtctatgggtataaaggagaccgctgtggtcgcaaatgaagcgcagatgcacgccgatgatcaggtgcagtatcaaaactggacctcgatgaaaggtgctgcagagatcctgaaaaagtttgagcaaaaaacacagctgtctgaaacctcgcaggctttgttatggaagtggatggtcgaaaccaccacaggaccagagcggttaaaaggtttgttaccagctggtactgtggtcgcacataaaactggtacttcgggtatcaaagccggaaaaactgcggccactaatgatttaggtatcattctgttgcctgatggacggcccttgctggttgctgtttttgtgaaagactcagccgagtcaagccgaaccaatgaagctatcattgcgcaggttgctcagactgcgtatcaatttgaattgaaaaagctttctgccctaagcccaaattaa

SEQ ID NO: 1443 - DNA, 23 bp, Artificial Sequence
  Synthetic DNA Sequence
cttctgctctgctgatgcttggc

SEQ ID NO: 1444 - DNA, 26 bp, Artificial Sequence
  Synthetic DNA Sequence
ggcgaccaggtattttgtaatactgc

SEQ ID NO: 1445 - DNA, 927 bp, Salmonella typhimurium strain JMC
atgaatgtcatcacaaaatgtgttttcaccgcttctgctctgctgatgcttggcttaagttcatttgtagtatcagcccaatcccctttgttaaaagagcagattgaaaccatagtgacgggtaaaaaggccactgtaggtgtagcagtgtgggggcctgacgatctggaacctttgttgctgaatccatttgaaaagtttccgatgcaaagtgtgtttaaactgcatttagctatgttagttctgcatcaggtcgatcaggggaaactggatttaaatcagtctgttactgttaatcgtgctgcagtattacaaaatacctggtcgccaatgatgaaagatcatcagggcgatgaatttactgttgcagtacagcagttactgcagtattcggtgtcacacagcgacaatgtggcctgcgatttgttatttgaactggtgggcgggccgcaagctttgcatgcttatatccagtctttaggcgttaaagaagctgccgtggtagcaaatgaagcgcaaatgcatgcggatgatcaggtgcaatatcaaaactggacgtcgatgaaagccgcagcacaagttctgcaaaagtttgaacagaaaaagcagttgtctgaaacctctcaggccttgttatggaaatggatggttgaaaccaccacaggaccacagcggttaaaaggcttgttacctgctggtactatagtggcgcataaaaccggtacttcgggcgtcagagcaggaaaaactgcggcgactaatgatgcgggcgtcattatgttgcctgatggacggcctttattggtggcggtatttgtcaaggattcggctgaatcagaacgaaccaatgaagctattattgcgcaggttgcgcaagcggcttatcagtttgagctgaaaaaactctctgcagtgagtccggattga

SEQ ID NO: 1446 - DNA, 27 bp, Artificial Sequence
  Synthetic DNA Sequence
ggcctgygatttgttatttgaactggt

SEQ ID NO: 1447 - DNA, 23 bp, Artificial Sequence
  Synthetic DNA Sequence
cgctstggtcctgtggtggtttc

SEQ ID NO: 1448 - DNA, 26 bp, Artificial Sequence
  Synthetic DNA Sequence
gatcaggtgcartatcaaaactggac

SEQ ID NO: 1449 - DNA, 26 bp, Artificial Sequence
  Synthetic DNA Sequence
agcwggtaacaayccttttaaccgct

SEQ ID NO: 1450 - DNA, 26 bp, Artificial Sequence
  Synthetic DNA Sequence
accactgggaatacacttgtaatggc

SEQ ID NO: 1451 - DNA, 26 bp, Artificial Sequence
  Synthetic DNA Sequence
atctacctggtcaatcattgcttcgt

SEQ ID NO: 1452 - DNA, 486 bp, Staphylococcus epidermidis strain BM10393
atgacattatcaataattgtcgctcacgataaacaaagagtcattgggtaccaaaatcaattaccttggcacttaccaaatgatttaaagcatattaaacaactgaccactgggaatacacttgtaatggcacggaaaacttttaattctatagggaagccattgccaaatagacgtaacgtcgtactcactaaccaagcttcatttcaccatgaaggggtagatgttataaactctcttgatgaaattaaagagttatctggtcatgtttttatatttggaggacaaacgttatacgaagcaatgattgaccaggtagatgatatgtatatcacagtaatagatggaaagtttcaaggagacacattctttccaccatacacattcgaaaactgggaagtcgaatcttcagtagaaggtcaactagatgaaaaaaatactataccgcatacattcttacatttagtgcgtagaaaagggaaatag

SEQ ID NO: 1453 - DNA, 26 bp, Artificial Sequence
  Synthetic DNA Sequence
atcgaagaatggagttatcggraatg

SEQ ID NO: 1454 - DNA, 25 bp, Artificial Sequence
  Synthetic DNA Sequence
cctaaaaytrctggggatttcwgga

SEQ ID NO: 1455 - DNA, 24 bp, Artificial Sequence
  Synthetic DNA Sequence
caggtggtggggagatatacaaaa

SEQ ID NO: 1456 - DNA, 26 bp, Artificial Sequence
  Synthetic DNA Sequence
tatgttagasrcgaagtcttggktaa

SEQ ID NO: 1457 - DNA, 22 bp, Artificial Sequence
  Synthetic DNA Sequence
caaaggtgaacagctcctgttt

SEQ ID NO: 1458 - DNA, 27 bp, Artificial Sequence
  Synthetic DNA Sequence
tccgttattttctttaggttggttaaa

SEQ ID NO: 1459 - DNA, 20 bp, Artificial Sequence
  Synthetic DNA Sequence
aaggtgaacagctcctgttt

SEQ ID NO: 1460 - DNA, 22 bp, Artificial Sequence
  Synthetic DNA Sequence
gatcactacgttctcattgtca

SEQ ID NO: 1461 - DNA, 474 bp, Escherichia coli
gtgaaactatcactaatggtagctatatcgaagaatggagttatcgggaatggccctgatattccatggagtgccaaaggtgaacagctcctgtttaaagctattacctataaccaatggctgttggttggacgcaagacttttgaatcaatgggagcattacccaaccgaaagtatgcggtcgtaacacgtccaagttttacatctgacaatgagaacgtagtgatctttccatcaattaaagatgctttaaccaacctaaagaaaataacggatcatgtcattgtttcaggtggtggggagatatacaaaagcctgatcgatcaagtagatacactacatatatctacaatagacatcgagccggaaggtgatgtttactttcctgaaatccccagcaattttaggccagtttttacccaagacttcgcctctaacataaattatagttaccaaatctggcaaaagggttaa

SEQ ID NO: 1462 - DNA, 23 bp, Artificial Sequence
  Synthetic DNA Sequence
gcactcccyaataggaaatacgc

SEQ ID NO: 1463 - DNA, 23 bp, Artificial Sequence
  Synthetic DNA Sequence
agtgttgctcaaaaacaacttcg

SEQ ID NO: 1464 - DNA, 23 bp, Artificial Sequence
  Synthetic DNA Sequence
acgttygaatctatgggmgcact

SEQ ID NO: 1465 - DNA, 23 bp, Artificial Sequence
  Synthetic DNA Sequence
gtcgataagtggagcgtagaggc

SEQ ID NO: 1466 - DNA, 23 bp, Artificial Sequence
  Synthetic DNA Sequence
aagcattgacctacaatcagtgt

SEQ ID NO: 1467 - DNA, 27 bp, Artificial Sequence
  Synthetic DNA Sequence
aatacaactacattgtcatcatttgat

SEQ ID NO: 1468 - DNA, 26 bp, Artificial Sequence
  Synthetic DNA Sequence
cgttacccgctcaggttggacatcaa

SEQ ID NO: 1469 - DNA, 23 bp, Artificial Sequence
  Synthetic DNA Sequence
catccccctctggctcgatgtcg

SEQ ID NO: 1470 - DNA, 474 bp, Escherichia coli
ttgaaagtatcattgatagctgcgaaacgaaaaaacggcgtgattggttgcggtccagacataccgtggtccgcgaaaggggagcagctactttttaaagcattgacctacaatcagtgtcttctggtgggtcgcaagacgtttgaatctatgggcgcactccccaataggaaatacgcggtcgttacccgctcaggttggacatcaaatgatgacaatgtagttgtatttcagtcaatcgaagaggccatggacaggctagctgaattcaccggtcacgttatagtgtctggtggcggagaaatttaccgagaaacattacccatggcctctacgctccacttatcgacgatcgacatcgagccagagggggatgttttcttcccgagtattccaaataccttcgaagttgtttttgagcaacactttacttcaaacattaactattgctatcaaatttggaaaaagggttaa

SEQ ID NO: 1471 - DNA, 26 bp, Artificial Sequence
  Synthetic DNA Sequence
gataatgacaacgtaatagtattccc

SEQ ID NO: 1472 - DNA, 23 bp, Artificial Sequence
  Synthetic DNA Sequence
gctcaatatcaatcgtcgatata

SEQ ID NO: 1473 - DNA, 26 bp, Artificial Sequence
  Synthetic DNA Sequence
ttaaagccttgacgtacaaccagtgg

SEQ ID NO: 1474 - DNA, 26 bp, Artificial Sequence
  Synthetic DNA Sequence
tgggcaatgtttctctgtaaatctcc

SEQ ID NO: 1475 - DNA, 474 bp, Escherichia coli
gtgaaagtatcattaatggctgcaaaagcgaaaaacggagtgattggttgcggtccacacataccctggtccgcgaaaggagagcagctactctttaaagccttgacgtacaaccagtggcttttggtgggccgcaagacgttcgaatctatgggagcactccctaataggaaatacgcggtcgttactcgctcagcctggacggccgataatgacaacgtaatagtattcccgtcgatcgaagaggccatgtacgggctggctgaactcaccgatcacgttatagtgtctggtggcggggagatttacagagaaacattgcccatggcctctacgctccatatatcgacgattgatattgagccggaaggagatgttttctttccgaatattcccaataccttcgaagttgtttttgagcaacactttagctcaaacattaactattgctatcaaatttggcaaaagggttaa

SEQ ID NO: 1476 - DNA, 22 bp, Artificial Sequence
  Synthetic DNA Sequence
ggcgagcagctcctattcaaag

SEQ ID NO: 1477 - DNA, 25 bp, Artificial Sequence
  Synthetic DNA Sequence
taggtaagctaatgccgattcaaca

SEQ ID NO: 1478 - DNA, 26 bp, Artificial Sequence
  Synthetic DNA Sequence
gagaatggagtaattggctctggatt

SEQ ID NO: 1479 - DNA, 25 bp, Artificial Sequence
  Synthetic DNA Sequence
gcgaaatacacaacatcagggtcat

SEQ ID NO: 1480 - DNA, 474 bp, Proteus mirabilis strain J120
atgaaaatatctcttatggcagctgtttccgagaatggagtaattggctctggattggatataccttggcatgtacaaggcgagcagctcctattcaaagccatgacttacaatcaatggcttctagttggtcgtaaaaccttcgactcaatgggtaaacttccgaatagaaaatatgcagtggttactcgttctaaaattatctcgaatgaccctgatgttgtgtatttcgcaagtgttgaatcggcattagcttacctaaacaatgcgacagcacatatctttgtttctggtggtggtgaaatatataaagctttaatcgatcaagcagatgttatccatctttcagtgattcacaagcatatctctggcgatgtgttttttcctccagttccacagggcttcaagcaaacatttgagcaaagtttcagttcaaatattgattacacgtaccaaatttgggcaaagggctaa

SEQ ID NO: 1481 - DNA, 24 bp, Artificial Sequence
  Synthetic DNA Sequence
rttacagatcatktatatgtctct

SEQ ID NO: 1482 - DNA, 26 bp, Artificial Sequence
  Synthetic DNA Sequence
taatttatattagacawaaaaaactg

SEQ ID NO: 1483 - DNA, 23 bp, Artificial Sequence
  Synthetic DNA Sequence
carygtcagaaaatggcgtaatc

SEQ ID NO: 1484 - DNA, 26 bp, Artificial Sequence
  Synthetic DNA Sequence
tkcaaagcrwtttctattgaaggaaa

SEQ ID NO: 1485 - DNA, 23 bp, Artificial Sequence
  Synthetic DNA Sequence
aaaatggcgtaatcggtaatggc

SEQ ID NO: 1486 - DNA, 26 bp, Artificial Sequence
  Synthetic DNA Sequence
catttgagcttgaaattcctttcctc

SEQ ID NO: 1487 - DNA, 26 bp, Artificial Sequence
  Synthetic DNA Sequence
aatcgaaaatatgcagtagtgtcgag

SEQ ID NO: 1488 - DNA, 24 bp, Artificial Sequence
  Synthetic DNA Sequence
agactattgtagatttgaccgcca

SEQ ID NO: 1489 - DNA, 474 bp, Escherichia coli strain VA292
ttgaaaatttcattgatttctgcaacgtcagaaaatggcgtaatcggtaatggccctgatatcccatggtcagcaaaaggtgagcagttactctttaaagcgctcacatataatcagtggctccttgttggaaggaaaacatttgactctatgggtgttcttccaaatcgaaaatatgcagtagtgtcgaggaaaggaatttcaagctcaaatgaaaatgtattagtctttccttcaatagaaatcgctttgcaagaactatcgaaaattacagatcatttatatgtctctggtggcggtcaaatctacaatagtcttattgaaaaagcagatataattcatttgtctactgttcacgttgaggttgaaggtgatatcaattttcctaaaattccagagaatttcaatttggtttttgagcagttttttttgtctaatataaattacacatatcagatttggaaaaaaggctaa

SEQ ID NO: 1490 - DNA, 25 bp, Artificial Sequence
  Synthetic DNA Sequence
gacctatgagagcttgcccgtcaaa

SEQ ID NO: 1491 - DNA, 26 bp, Artificial Sequence
  Synthetic DNA Sequence
tcgccttcgtacagtcgcttaacaaa

SEQ ID NO: 1492 - DNA, 26 bp, Artificial Sequence
  Synthetic DNA Sequence
cattttagctgccaccgccaatggtt

SEQ ID NO: 1493 - DNA, 25 bp, Artificial Sequence
  Synthetic DNA Sequence
gcgtcgctgacgttgttcacgaaga

SEQ ID NO: 1494 - DNA, 510 bp, Escherichia coli strain BL26A
atgatcgagcttcatgccattttagctgccaccgccaatggttgcattgggaaggacaacgcacttccctggccaccactaaaaggcgatctggccagattcaaaaaattgaccatggggaaggtggtcattatggggcgcaagacctatgagagcttgcccgtcaaattagaaggtcgcacctgcatcgttatgacgcgccaagcgctggagcttccgggtgttcgtgacgctaacggcgctatcttcgtgaacaacgtcagcgacgccatgcggttcgctcaagaagagagcgtgggcgatgtggcctacgtcattggtggcgctgagatattcaagcgacttgccttgatgatcacgcagattgaattgacctttgttaagcgactgtacgaaggcgacacctacgttgatctggccgaaatggtcaaagactacgagcagaatggcatggaagaacatgaccttcacacttacttcacttaccgtaaaaaggagcttacagaatga

SEQ ID NO: 1495 - DNA, 24 bp, Artificial Sequence
  Synthetic DNA Sequence
tctctaaacatgattgtcgctgtc

SEQ ID NO: 1496 - DNA, 24 bp, Artificial Sequence
  Synthetic DNA Sequence
cagtgaggcaaaagtttttctacc

SEQ ID NO: 1497 - DNA, 25 bp, Artificial Sequence
  Synthetic DNA Sequence
cggacgacttcatgtggtagtcagt

SEQ ID NO: 1498 - DNA, 26 bp, Artificial Sequence
  Synthetic DNA Sequence
tttgttttcagtaatggtcgggacct

SEQ ID NO: 1499 - DNA, 534 bp, Escherichia coli
atggcttctctaaacatgattgtcgctgtcaataagacaggaggtatcggatttgaaaatcagattccgtggcatgaaccagaagatttaaaacacttcaaagctgttacaatgaactcagttttgattatgggtagaaaaacttttgcctcactgcctaaagtgctgcccggacgacttcatgtggtagtcagtaaaacagtaccacccacccagaacactgatcaagttgtgtatgtaagtacataccagatcgcagtaagaactgcaagcttgttggttgacaaaccagagtattctcaaatttttgtaattggtgggaagagtgcgtacgagaacttagctgcctacgtggacaaactctacttaactagagtacagctcaacacacaacaagacactgaactggatttatccctattcaagtcatggaaactcgtatctgaggtcccgaccattactgaaaacaaaacaaaacttattttccaaatttggattaaccctaaccctattagtgaggaacccacatgttag

SEQ ID NO: 1500 - DNA, 24 bp, Artificial Sequence
  Synthetic DNA Sequence
atcgggttattggcaatggtccta

SEQ ID NO: 1501 - DNA, 25 bp, Artificial Sequence
  Synthetic DNA Sequence
gcggtagttagcttggcgtgagatt

SEQ ID NO: 1502 - DNA, 22 bp, Artificial Sequence
  Synthetic DNA Sequence
gcgggcggagctgagatataca

SEQ ID NO: 1503 - DNA, 26 bp, Artificial Sequence
  Synthetic DNA Sequence
aacggagtgggtgtacggaattacag

SEQ ID NO: 1504 - DNA, 498 bp, Escherichia coli strain TKS84
atgaactcggaatcagtacgcatttatctcgttgctgcgatgggagccaatcgggttattggcaatggtcctaatatcccctggaaaattccgggtgagcagaagatttttcgcagactcactgagggaaaagtcgttgtcatggggcgaaagacctttgagtctatcggcaagcctctaccgaaccgtcacacattggtaatctcacgccaagctaactaccgcgccactggctgcgtagttgtttcaacgctgtcgcacgctatcgctttggcatccgaactcggcaatgaactctacgtcgcgggcggagctgagatatacactctggcactacctcacgcccacggcgtgtttctatctgaggtacatcaaaccttcgagggtgacgccttcttcccaatgctcaacgaaacagaattcgagcttgtctcaaccgaaaccattcaagctgtaattccgtacacccactccgtttatgcgcgtcgaaacggctaa

SEQ ID NO: 1505 - DNA, 24 bp, Artificial Sequence
  Synthetic DNA Sequence
atttttcgcaggctcaccgagagc

SEQ ID NO: 1506 - DNA, 27 bp, Artificial Sequence
  Synthetic DNA Sequence
cggatgagacaacctcgaattctgctg

SEQ ID NO: 1507 - DNA, 498 bp, Escherichia coli strain RA33.2
atgaacccggaatcggtccgcatttatctggtcgctgccatgggtgccaatcgggttattggcaatggtcccgatatcccctggaaaatcccaggtgagcagaagatttttcgcaggctcaccgagagcaaagtggtcgttatgggccgcaagacatttgagtccataggcaagcccttaccaaaccgccacacagtggtgctctcgcgccaagctggttatagcgctcctggttgtgcagttgtttcaacgctgtcacacgtatcgccatcgacagccgaacacggcaaagaactctacgtagcgcgcggagccgaggtatatgcgctggcgctaccgcatgccaacggcgtctttctatctgaggtacatcaaacctttgagggtgacgccttcttcccagtgcttaacgcagcagaattcgaggttgtctcatccgaaaccattcaaggcacaatcacgtacacgcactccgtctatgcgcgtcgtaacggctaa

SEQ ID NO: 1508 - DNA, 27 bp, Artificial Sequence
  Synthetic DNA Sequence
agaatgtattggtatttccatctatcg

SEQ ID NO: 1509 - DNA, 26 bp, Artificial Sequence
  Synthetic DNA Sequence
caatgtcgattgttgaaatatgtaaa

SEQ ID NO: 1510 - DNA, 22 bp, Artificial Sequence
  Synthetic DNA Sequence
tggagtgccaaaggggaacaat

SEQ ID NO: 1511 - DNA, 27 bp, Artificial Sequence
  Synthetic DNA Sequence
cagacacaatcacatgatccgttatcg

SEQ ID NO: 1512 - DNA, 474 bp, Escherichia coli strain UI14
gtgaaactatcactaatggcagcaatttcgaagaatggagttatcggaaatggcccagatattccatggagtgccaaaggggaacaattactcttcaaagcgattacctataatcagtggcttttggtaggccgaaagactttcgagtcaatgggggctttacccaaccgaaaatatgccgttgtaactcgttcaagcttcacttccagtgatgagaatgtattggtatttccatctatcgatgaagcgctaaatcatctgaagacgataacggatcatgtgattgtgtctggtggtggtgaaatatacaaaagcctgatcgataaagttgatactttacatatttcaacaatcgacattgagccagaaggtgatgtctattttccagaaatccccagtagttttaggccagtttttagccaagacttcgtgtctaacataaattatagttaccaaatctggcaaaagggttaa

SEQ ID NO: 1513 - DNA, 23 bp, Artificial Sequence
  Synthetic DNA Sequence
ttcaagctcaaatgaaaacgtcc

SEQ ID NO: 1514 - DNA, 25 bp, Artificial Sequence
  Synthetic DNA Sequence
gaaattctcaggcattatagggaat

SEQ ID NO: 1515 - DNA, 23 bp, Artificial Sequence
  Synthetic DNA Sequence
gtggtcagtaaaaggtgagcaac

SEQ ID NO: 1516 - DNA, 26 bp, Artificial Sequence
  Synthetic DNA Sequence
tctttcaaagcattttctattgaagg

SEQ ID NO: 1517 - DNA, 474 bp, Escherichia coli strain EC107
ttgaaaatatcattgatttctgcagtgtcagaaaatggcgtaatcggtagtggtcctgatatcccgtggtcagtaaaaggtgagcaactactctttaaagcgctcacatataatcaatggctccttgtcggaagaaaaacatttgactctatgggtgttcttccaaatcgcaaatatgcagtagtgtcaaagaacggaatttcaagctcaaatgaaaacgtcctagtttttccttcaatagaaaatgctttgaaagagctatcaaaagttacagatcatgtatatgtctctggcgggggtcaaatctataatagccttattgaaaaagcagatataattcatttgtctactgttcacgttgaagtcgaaggtgatatcaaattccctataatgcctgagaatttcaatttggtttttgaacagttttttatgtctaatataaattatacataccagatttggaaaaaaggctaa

SEQ ID NO: 1518 - DNA, 125 bp, Acinetobacter lwoffi strain CDCF 3697
ctatgtctcaaggccgtgcaacatactctatggaatttgctaaatatgctgaaactccacgtaacgtggctgaaggcatcatttctaaatttcagtctggcggtaaaaaaggtgacgacgagtaa

SEQ ID NO: 1519 - DNA, 93 bp, Acinetobacter lwoffii strain CDCF 3697
tctttcgattactataagcccaaactaattcatagttaaaaaccaagtgctcatgcagtgatcctgcatgagtagtttaaaaaggaagatctc

SEQ ID NO: 1520 - DNA, 1106 bp, Acinetobacter lwoffii strain CDCF 3697
atggctaaggctaagtttgaacgtaataagccacacgttaacgtgggcacaatcggtcacgttgaccatggtaaaacaactttaacagctgcaattgcaactgtatgtgcgaagaaattcggtggcgaagcgaaagactacgctgcaattgactctgcaccagaagaaaaagcacgtggtattacaattaatacttcacacgtagaatacgattctccaactcgtcactacgcacacgtagactgcccgggccacgccgattatgttaaaaacatgattactggtgctgctcagatggacggcgcgatccttgtatgtgctgcgactgatggtccaatgccacagactcgtgaacacatccttctttctcgtcaggttggtgtaccttacattcttgtattccttaacaagtgtgaccttgttgatgatgaagaacttcttgagctagtggaaatggaagttcgtgaacttctttctacttatgacttcccaggtgatgacactccagttatccgtggttcagctcttcttgcacttaacggtgacgctggtcagtatggcgaagaagcagttgttgcgcttgttgacgcacttgacacttacattccagagccagtacgtgcaatcgaccaagcattcttaatgccaatcgaagacgtattctctatttctggtcgtggtacagtagtaactggccgtgtagaaactggtattgtgaaagtaggcgaatcagttgaaatcgttggtatccgtgatactcaagtaactacagttactggcgtagaaatgttccgtaaattgcttgacgaaggtcgtgcgggcgagaactgtggtgttcttctacgtggtactaagcgtgaagacgtacaacgtggtcaagtacttgctaaaccaggtgcaatcaagccacacactaaattcgatgcagaagtatacgtactttctaaagaagaaggtggtcgtcacactccattccttaacggttaccgtccacagttctacttccgtacaactgacgtaactggcgcgatcaaattacaagatggcgttgaaatggttatgcctggtgacaacgtagaaatgtcagtagaattaatccacccaat

SEQ ID NO: 1521 - DNA, 100 bp, Haemophilus influenzae ATCC 9006
acaaactcaaggtcgtgcatcttactcaatggaaccgttaaaatatgctgaagctccaacaagtgttgcggctgcagtaattgaagcgcgtaaaaaataa

SEQ ID NO: 1522 - DNA, 64 bp, Haemophilus influenzae ATCC 9006
tttttgtaaaccagcggtgtaaaatatgattgttttataccgcacttcttaggaaacattagaa

SEQ ID NO: 1523 - DNA, 1098 bp, Haemophilus influenzae ATCC 9006
atgtctaaagaaaaatttgaacgtacaaaaccgcacgtaaacgtgggtacaatcggccacgttgaccacggtaaaacaactttaacagcagcaattacaaccgtattagcaaaacactacggtggtgcagcgcgtgcatttgaccaaatcgataacgcgccagaagaaaaagcgcgtggtattaccatcaacacttcacatgttgaatacgatacaccaactcgccactatgcacacgtagactgtccaggacacgccgactatgttaaaaacatgattaccggtgcggcgcaaatggatggtgctattttagtagtagcagcaacagatggtcctatgccacaaactcgtgaacatatcttattaggtcgccaagtaggtgttccatacatcatcgtattcttaaacaaatgcgacatggtagatgatgaagagttattagaattagtagaaatggaagtgcgtgaacttctatctcaatatgacttcccaggtgacgatacaccaatcgtacgtggttcagcattacaagcattgaacggcgtagcagaatgggaagaaaaaatccttgaattagctggtcacttagatacttacatcccagaaccagaacgtgcgattgaccaaccgttccttcttccaattgaagacgtattctcaatttcaggtcgtggtacagtagtaactggtcgtgtagaacgtggtatcatccgtactggtgatgaagtagaaatcgtcggtatcaaagatacagcgaaaactactgtaacaggtgttgaaatgttccgtaaattacttgacgaaggtcgtgcaggtgaaaacatcggtgcattattacgtggtaccaaacgtgaagaaatcgaacgtggtcaagtattagcgaaaccaggttcaatcacaccacacactgattttgaatcagaagtatacgtattatcaaaagatgaaggtggtcgtcatactccattcttcaaaggttaccgtccacaattctatttccgtacaacagacgtaactggtacaattgaattaccagaaggcgtggaaatggtaatgccaggcgataacatcaagatgacagtaagcttaatccaccca

SEQ ID NO: 1524 - DNA, 77 bp, Proteus mirabilis ATCC 25933
caatggagttcttgaagtacaacgaagcgcctagcaacgtcgctcaggctattatcgaagctcgtaaagcgaaataa

SEQ ID NO: 1525 - DNA, 67 bp, Proteus mirabilis ATCC 25933
gatcctttcgagttcaatttagtttacgctccctctgtgagagggagcgatattaaggaatatagtc

SEQ ID NO: 1526 - DNA, 1112 bp, Proteus mirabilis ATCC 25933
gtgtctaaagaaaaatttgaacgttcaaaaccgcacgttaacgttggtactatcggccacgttgaccacggtaaaacaactctgactgctgcaatcactacagttttagctaaaacttacggtggtgctgctcgtgcattcgaccaaatcgataatgcaccagaagaaaaagcgcgtggtatcaccatctctacttcacacgtagaatacgatactccaactcgccactacgcacacgtagactgcccaggtcacgccgactatgttaaaaacatgatcactggtgctgcgcaaatggacggcgctattctggtagtagcagcaactgatggtccaatgccacaaactcgtgagcacatcctgttaggtcgtcaggttggtgttccttacatcatcgtattcctgaacaaatgtgacatggtagatgatgaagagctgttagaattagttgaaatggaagttcgtgaacttctgtctcaatacgatttcccaggtgatgacactccagtaatccgtggttcagcgctgaaagcactggaaggcgaagcagagtgggaagcaaaaattgttgaattagcagaagcactggattcttatatcccagagccagagcgtgcaattgacaaaccattcctgttaccaatcgaagatgtattctcaatctcaggccgtggtacagtagttactggtcgtgtagagcgtggtatcatcaaagtaggtgatgaagttgagattgttggtatcaaagaaaccaccaaaacaacttgtactggcgttgaaatgttccgtaaattacttgacgaaggtcgtgcaggtgagaacgtaggtgttctgctgcgtggtacaaaacgtgaagaaatcgaacgtggacaagtactggcaaaaccaggctcaatcaacccacacaacaaatttgaatcagaagtttatattctgagcaaagatgaaggtggtcgtcacacaccattcttcaaaggctaccgtccacagttctacttccgtacaactgacgtaactggtactatcgaattaccagaaggcgtagaaatggtaatgccaggcgacaacgtgaacatgatcgttgaactgatccacccaatcgcaatggacga

SEQ ID NO: 1527 - DNA, 800 bp, Campylobacter curvus ATCC 35224
atcaacgaagctatcgaggtttattttgaggttgagggcaagaaaaatagattgatcctggaggtcgcggctcacttgggtgataaccgcgtcagaacgatcgctatggatatgagtgaggggcttactcgcgggcttgaagctaccgctcttggtgcgcctattagtgtgccggttggcgagaaggttttgggaagaatttttaacgtcgtcggcgatctcatcgacgagggcgagggcgtaaattttgataaacattggtctatccaccgcgatccgccaccatttgaagaacaaagcacgaaaagtgaaatttttgaaaccggtataaaggttgtggatcttcttgcgccttacgcaaagggcggtaaggtcggactatttggcggtgcaggtgtcggtaaaacggtcatcatcatggagctcatccacaatgtcgccttcaaacacagcggatactctgtatttgcaggtgttggcgagaggacgcgcgaaggaaacgacctttatcacgagatgaaagaaagtaacgttttggataaagtcgccttgtgctacggacagatgaacgagccgccaggggcgagaaatcgtatcgcactgactggtctaacgatggctgagtatttccgcgatgagatgggacttgatgtgcttatgtttatcgacaacatcttccgcttctctcaatctggtgcagagatgtcggcactcctcggacgtatcccatcagccgttggttaccagccgacgctggcaagcgagatgggtaaatttcaagaaaggatcacatcgactaa

SEQ ID NO: 1528 - DNA, 26 bp, Artificial Sequence
  Synthetic DNA Sequence
aacttgagcgattttcggataccctg

SEQ ID NO: 1529 - DNA, 24 bp, Artificial Sequence
  Synthetic DNA Sequence
ttgccgatgaaataaccgccgact

SEQ ID NO: 1530 - DNA, 1035 bp, Escherichia coli
atgcgattggtttggaaatgtggggcgattcaggcatcccggttatctgaatggctcaactcaacagccggtgctcatgaacttgagcgattttcggataccctgaccttttctgtgtatggctcagtgctgatctggctgaaatcatatctccgcgaatcaggaagaaaactgcagttagtcggaatcgccttacccaacaccctgaacccaagggacgacctagcgcaattggccgaaattatccagctcatcgatcacctcatgaaaccgcacgttgatatgttgactcacttgttggcgtccattgatggccagtcggcggttatttcatcggcaaaatggggggagctagaaacggctcggcaggagaaagctatctcaggggtaaccagattgaagctccgcttggcgtcgcttgcccccgtcctgaaaaaacacgtcaacagcgatttgttccgaaaagcctctgatcgaatagagtcgatagagtatacgttggaaaccttgcgtataatgaaaactttcttcgatggtacctctcttgagggagatacttccgtacgtgactcgtatatggcgggcgtagtagatggaatggttcgagcgaatccggatgtgaagataattctgctggcgcacaacaatcatctacaaaaaactccagtctccttttcaggcgagcttacggctgttcccatggggcagcacctcgcagagagggtgaattaccgtgcgattgcattcacccatcttggacccaccgtgccggaaatgcatttcccatcgccaaaaagtcctcttggattctctgttgtgaccacgcctgccgatgcaatccgtgaggatagtatggaacagtatgtcatcgacgcctgtggtacggagaattcatgtctgacattgacagatgcccccatggaagcaaagcgaatgcggtctcaaagcgcctctgtagaaacgaaattgagcgaggcatttgatgccatcgtctgtgttacaagcgccggcaaggacagcctggttgccctatag

SEQ ID NO: 1531 - DNA, 25 bp, Artificial Sequence
  Synthetic DNA Sequence
tctttttgttacgacatacgctttt

SEQ ID NO: 1532 - DNA, 24 bp, Artificial Sequence
  Synthetic DNA Sequence
agtgcttctttatccgctgttcta

SEQ ID NO: 1533 - DNA, 26 bp, Artificial Sequence
  Synthetic DNA Sequence
cagcggataaagaagcactacacatt

SEQ ID NO: 1534 - DNA, 23 bp, Artificial Sequence
  Synthetic DNA Sequence
cctcctgaaataaagcccgacat

SEQ ID NO: 1535 - DNA, 1260 bp, Escherichia coli
  misc_feature (1)...(1260): n=a,t,c or g
atgaggttcgaagaatgggtcaaagataagcatattccttncaaacngaatcaccctgatgataattacgatgattttaagccattaagaaanataattggagatacccgagttgtagcattaggtgaaaattctcatttcataaaagaattctttttgttacgacatacgcttttgcgtttttttatcgaagatctaggttttactacgtttgcttttgaatttggttttgctgagggtcaaatcatcaataactggatacatggacaaggaactgacgatgaaataggcagattcttaaaacacttctattatccagaagagctcaaaaccacatttctatggctaagggagtacaataaagcagcaaaagaaaaaatcacatttcttggcattgatatacccagaaatggaggttcatacttaccaaatatggagatagtgcatgacttttttagaacagcggataaagaagcactacacattatcgatgatgcatttaatattgcaaaaaagattgattacttctccacatcacaggcagccttaaatttacatgagctaacagattctgagaaatgccgtttaactagccaattagctcgagtaaaagttcgccttgaagctatggctccaattcacattgaaaaatatgggattgataaatatgagacaattctgcattatgccaacggtatgatatacttggactataacattcaagctatgtcgggctttatttcaggaggcggaatgcagggcgatatgggtgcaaaagacaaatacatggcagattctgtgctgtggcatttaaaaaacccacaaagtgagcagaaagtgatagtagtagcacataatgcacatattcaaaaaacacccattctgtatgatggatttctaagttgcctaccaatgggccaaagacttaaaaatgccattggtgatgattatatgtctttaggtattacttcttatagtgggcatactgcagccctctatccggaagttgatacaaaatatggttttcgagttgataacttccaactgcaggaaccaaatgaaggttctgtcgagaaagctatttctggttgtggagttactaattcttttgtcttttttagaaatattcctgaagatttacaatccatcccgaacatgattcgatttgantctatttacatgaaagcagaactcgagaaagctttcgatggaatatttcaaattgaaaagtcatctgtatctgaggtcgtttatgaataa

SEQ ID NO: 1536 - DNA, 25 bp, Artificial Sequence
  Synthetic DNA Sequence
agatgtattaactggaaaacaacaa

SEQ ID NO: 1537 - DNA, 25 bp, Artificial Sequence
  Synthetic DNA Sequence
ctttgtaattagtttctgaaaacca

SEQ ID NO: 1538 - DNA, 28 bp, Artificial Sequence
  Synthetic DNA Sequence
ttagaagatataggatacaaaatagaag

SEQ ID NO: 1539 - DNA, 22 bp, Artificial Sequence
  Synthetic DNA Sequence
gaatgaaaaagaagttgagctt

SEQ ID NO: 1540 - DNA, 486 bp, Staphylococcus haemolyticus
atgaaaaataataatgtaacagaaaaagaattattttatattttagatttatttgaacacatgaaagtaacttattggttagatggtggctggggggtagatgtattaactggaaaacaacaaagagaacacagagatatagatatagattttgacgctcaacacactcaaaaagttatacaaaaattagaagatataggatacaaaatagaagttcattggatgccttcacgtatggaacttaagcatgaagaatatgggtatttagatattcatcctataaatctaaatgatgatggatcaattacccaagcaaacccagaaggtggtaattatgttttccaaaatgactggttttcagaaactaattacaaagatcgaaaaataccatgtatttcaaaagaagctcaacttctttttcattctggttatgatttaacagaaacagaccattttgatataaaaaatttaaaatcaataacataa

SEQ ID NO: 1541 - DNA, 25 bp, Artificial Sequence
  Synthetic DNA Sequence
tgataatcttatacgtggggaattt

SEQ ID NO: 1542 - DNA, 26 bp, Artificial Sequence
  Synthetic DNA Sequence
ataattttctaattgccctgtttcat

SEQ ID NO: 1543 - DNA, 26 bp, Artificial Sequence
  Synthetic DNA Sequence
gggcaattagaaaattatttatcaga

SEQ ID NO: 1544 - DNA, 26 bp, Artificial Sequence
  Synthetic DNA Sequence
ttttactcatgtttagccaattatca

SEQ ID NO: 1545 - DNA, 804 bp, Enterococcus faecium
atgttaaaacaaaaagaattaattgcaaacgttaagaatcttactgagtcagatgaacgaattacagcttgtatgatgtatggatcgtttaccaaaggagaaggtgaccaatactctgatatagagttctatatatttttgaaacatagtataacctcgaactttgattcatccaactggttgtttgacgtagctccgtacttgatgctttataaaaatgagtacggaacagaggtagttatttttgataatcttatacgtggggaatttcatttcctttctgaaaaagatatgaacataatcccctcgtttaaagattcaggttatattcctgatacgaaggctatgcttatttacgatgaaacagggcaattagaaaattatttatcagagataagtggtgcaagaccaaatagacttactgaagaaaatgctaattttttgttgtgtaatttctctaatctatggttgatgggaatcaacgttctaaaaagaggagaatatgctcgttcattagaactcttatcacaacttcaaaaaaatacactacaacttatacgtatggcagaaaaaaatgctgataattggctaaacatgagtaaaaaccttgaaaaagaaattagccttgaaaattataaaaaatttgcaaagaccactgctcgattagataaggtagaattatttgaagcctataaaaattctttgctattagttatggatttgcaaagtcaccttattgaacaatacaacttaaaagttacacatgacattttagaaagattgttgaattacattagtgaatag

SEQ ID NO: 1546 - DNA, 22 bp, Artificial Sequence
  Synthetic DNA Sequence
caagaaggaatggctgtactac

SEQ ID NO: 1547 - DNA, 27 bp, Artificial Sequence
  Synthetic DNA Sequence
taattcccaaataaccctaataataga

SEQ ID NO: 1548 - DNA, 1218 bp, Streptococcus pyogenes
atggaaaaatacaacaattggaaacttaagttttatacaatatgggcagggcaagcagtatcattaatcactagtgccatcttgcaaatggcgattattttttaccttacagaaaaaactggatccgcgatggtcttgtctatggcttcactattaggttttttaccctatgcggtctttggacctgcaattggtgtgctagtggatcgtcatgataggaagaagataatgattggtgctgatttaattatcgcagcagctggttcggtgcttactattgttgcattctatatggagctacctgtctggatggttatgatagtattgtttatccgtagcattggaacagcttttcacaccccggctctcaatgcggttacgccacttttagtaccagaagaacagcttacgaaatgtgcaggctatagtcagtctttgcagtctataagctatattgttagtccggcggttgcagcactcttatactccgtttgggaactaaatgctattattgccatcgatgtattgggtgctgtgattgcatctattacggtagcaattgtacgtattcctaagctgggtgatcgcgtgcaaagtttggacccaaatttcataagagaaatgcaagaaggaatggctgtactacggcaaaataaaggattatttgctttattactcgttggaacattatatatgtttgtttatatgccaattaatgcactattccctttaattagcatggattactttaatggaacacctgtgcatatttctattacggaaatttcctttgcatctggaatgttgatagggggtctattattagggttatttgggaattaccaaaagcgaatcttattaataacggcatccatttttatgatggggataagcttaaccatttcaggattacttccccaaagtggatttttcatttttgtagtctgctgtgcaataatggggctttctgttccgttttacagcggtgtgcaaacagctctttttcaggagaaaattaagcctgaatatttaggacgtgtattttctttaactggaagtatcatgtctcttgctatgccaattggattaattctttctgcactctttgctgatagaatcggtgtaaatcattggtttttactatcaggtactttaattatttgcattgcaatagtttgcccaatgataaatgagattagaaaattagatttaaaataa

SEQ ID NO: 1549 - DNA, 26 bp, Artificial Sequence
  Synthetic DNA Sequence
gcttattattaggaagattagggggc

SEQ ID NO: 1550 - DNA, 24 bp, Artificial Sequence
  Synthetic DNA Sequence
tagcaagtgacatgatacttccga

SEQ ID NO: 1551 - DNA, 1218 bp, Streptococcus pneumoniae
atggaaaaatacaacaattggaaacgaaaattttatgcaatatgggcagggcaagcagtatcattaatcactagtgccatcctgcaaatggcgattattttttaccttacagaaaaaacaggatctgcgatggtcttgtctatggcttcattagtaggttttttaccctatgcgattttgggacctgccattggtgtgctagtggatcgtcatgataggaagaagataatgattggtgccgatttaattatcgcagcagctggtgcagtgcttgctattgttgcattctgtatggagctacctgtctggatgattatgatagtattgtttatccgtagcattggaacagcttttcataccccagcactcaatgcggttacaccacttttagtaccagaagaacagctaacgaaatgcgcaggctatagtcagtctttgcagtctataagctatattgttagtccggcagttgcagcactcttatactccgtttgggatttaaatgctattattgccatcgacgtattgggtgctgtgattgcatctattacggtagcaattgtacgtatacctaagctgggtaatcaagtgcaaagtttagaaccaaatttcataagggagatgaaagaaggagttgtggttctgagacaaaacaaaggattgtttgccttattactcttaggaacactatatacttttgtttatatgccaatcaatgcactatttcctttaataagcatggaacactttaatggaacgcctgtgcatatttctattacggaaatttcctttgcatttgggatgctagcaggaggcttattattaggaagattagggggcttcgaaaagcatgtattactaataacaagttcattttttataatggggaccagtttagccgtttcgggaatacttcctccaaatggatttgtaatattcgtagtttgctgtgcaataatggggctttcggtgccattttatagcggtgtgcaaacagctctttttcaggagaaaattaagcctgaatatttaggacgtgtattttctttgatcggaagtatcatgtcacttgctatgccaattgggttaattctttctggattctttgctgataaaatcggtgtaaatcattggtttttactatcaggtattttaattattggcattgctatagtttgccaaatgataactgaggttagaaaattagatttaaaataa

SEQ ID NO: 1552 - DNA, 24 bp, Artificial Sequence
  Synthetic DNA Sequence
ggcaagcagtatcattaatcacta

SEQ ID NO: 1553 - DNA, 26 bp, Artificial Sequence
  Synthetic DNA Sequence
caatgctacggataaacaatactatc

SEQ ID NO: 1554 - DNA, 27 bp, Artificial Sequence
  Synthetic DNA Sequence
agaaaattaagcctgaatatttaggac

SEQ ID NO: 1555 - DNA, 25 bp, Artificial Sequence
  Synthetic DNA Sequence
tagtaaaaaccaatgatttacaccg

SEQ ID NO: 1556 - DNA, 25 bp, Artificial Sequence
  Synthetic DNA Sequence
actgtacgcacttgcagcccgacat

SEQ ID NO: 1557 - DNA, 24 bp, Artificial Sequence
  Synthetic DNA Sequence
gaacggcaggcgattcttgagcat

SEQ ID NO: 1558 - DNA, 22 bp, Artificial Sequence
  Synthetic DNA Sequence
gtggtggtgcatggcgatctct

SEQ ID NO: 1559 - DNA, 24 bp, Artificial Sequence
  Synthetic DNA Sequence
gccgcagcgaggtactcttcgtta

SEQ ID NO: 1560 - DNA, 906 bp, Escherichia coli
atgaccgtagtcacgaccgccgatacctcccaactgtacgcacttgcagcccgacatgggctcaagctccatggcccgctgactgtcaatgagcttgggctcgactataggatcgtgatcgccaccgtcgacgatggacgtcggtgggtgctgcgcatcccgcgccgagccgaggtaagcgcgaaggtcgaaccagaggcgcgggtgctggcaatgctcaagaatcgcctgccgttcgcggtgccggactggcgcgtggccaacgccgagctcgttgcctatcccatgctcgaagactcgactgcgatggtcatccagcctggttcgtccacgcccgactgggtcgtgccgcaggactcggaggtcttcgcggagagcttcgcgaccgcgctcgccgccctgcatgccgtccccatttccgccgccgtggatgcggggatgctcatccgtacaccgacgcaggcccgtcagaaggtggccgacgacgttgaccgcgtccgacgcgagttcgtggtgaacgacaagcgcctccaccggtggcagcgctggctcgacgacgattcgtcgtggccagatttctccgtggtggtgcatggcgatctctacgtgggccatgtgctcatcgacaacacggagcgcgtcagcgggatgatcgactggagcgaggcccgcgttgatgaccctgccatcgacatggccgcgcaccttatggtctttggtgaagaggggctcgcgaagctcctcctcacgtatgaagcggccggtggccgggtgtggccgcggctcgcccaccacatcgcggagcgccttgcgttcggggcggtcacctacgcactcttcgccctcgactcgggtaacgaagagtacctcgctgcggcgaaggcgcagctcgccgcagcggaatga

SEQ ID NO: 1561 - DNA, 1048 bp, Candida albicans ATCC 18804
gatcatggtaaaactacattgactgctgctatcaccaaagttttagccgaacaaggtggtgccaacttcttggattayggttctattgatagagctccagaagaaagagctagaggtatcactatttccactgcccacgttgaatacgaaaccaagaacagacactatgcccacgttgattgtccaggacacgctgattatatcaaaaatatgattactggtgccgctcaaatggatggtgctatcattgttgttgctgccactgatggtcaaatgcctcaaaccagagaacatttgttattggccagacaagttggtgttcaagacttggttgtgtttgtcaacaaagtcgatactattgatgaccctgaaatgttggaattagtcgaaatggaaatgagagaattgttatccacctacggttttgatggtgacaacactccagttattatgggatctgctttaatggctttggaagacaagaaaccagaaattggtaaggaagctatcttgaaattgttagatgctgtcgatgaacacattccaactccatcaagagacttggaacaaccatttttgttaccagttgaagacgtgttctccatctccggtagaggaactgttgtcactggtagagttgaaagaggtgttttgaagaagggtgaagaaatcgaaattgttggtggttttgacaaaccttacaagactactgttaccggtattgaaatgttcaaaaaagaattagactctgctatggctggtgacaactgtggtgttttgttaagaggtgttaaaagagatgaaatcaagagaggtatggttttggccaaaccaggtactgccacttctcacaagaagttcttggcttccttgtatattttgacttccgaagaaggtggycgttccactccatttggtgaaggttacaagcctcaatgcttcttcagaactaacgatgtcactaccacattttcattcccagaaggagaaggtgttgaccattctcaaatgatcatgccaggtgacaacattgaaatggttggtgaat

SEQ ID NO: 1562 - DNA, 1074 bp, Candida dubliniensis strain NCPF 3949
tgatcacggtaaaaccacattaactgctgccattaccaaagtattagctgaacaaggtggtgccaactttttggattacggttccattgatagagctccagaagaaagagccagaggtatcactatttccactgcccacgttgaatacgaaaccaagaacagacactatgcccacgttgattgtccaggacacgctgattatatcaaaaacatgattactggtgctgctcaaatggatggtgctatcattgttgttgctgctactgacggtcaaatgccacaaaccagagaacatttattgttggcaagacaagttggtgttcaagacttggttgtctttgtcaacaaagttgatactattgatgaccctgagatgttggaattagtcgaaatggaaatgagagaattgttgtccacctacggttttgatggtgacaacactcctgttattatgggatctgctttaatggccttggaaggcaaaaaaccagaaattggtaaggaagctattttgagattgttagatgctgtcgatgaacacattccaactccatcaagagacttggaacaaccatttttgttgccagttgaagacgtgttctccatctctggtagaggaactgttgtcaccggtagagttgaaagaggtgtcttgaagaagggtgaagaaatcgaaattgttggtggttttgacaaaccatacaagaccactgttactggtattgaaatgttcaaaaaggaattagattctgctatagctggtgacaactgtggtgttttgttgagaggtgttaaaagagatgaaatcaagagaggtatggttttggccaagccaggtactgctacttctcacaagaaatttttagcatctttgtatattttgacttcagaagaaggtggtcgttccactccatttggagaaggttacaagcctcaatgtttcttcagaactaatgacgtcactaccacattttcattcccagaaggagaaggtgttgaccactcccaaatggtcatgccaggtgataacattgaaatggttggtgaattgatcaaatcatgtccattggaagt

SEQ ID NO: 1563 - DNA, 1033 bp, Candida famata ATCC 62894
gatcacgggaagactactttgaccgctgccatcaccaaagttttagccgaaaaaggtggtgctaacttcttggactacggttctatcgataaagctccagaagaaagagccagaggtattactatttctgctgcccatgttgaatacgaaactgacaagagacactatgcccatgttgattgtccaggtcacgcagattatatcaagaatatgattactggtgctgctcaaatggatggtgccattattgttgttgctgcttccgatggtcaaatgcctcaaaccagagaacatttgttattggccagacaagttggtgttcaacacttggttgttttcgtcaacaaggtcgacaccattgacgatccagaaatgttggaattggttgaaatggaaatgagagatttgttaactacttacggttttgatggtgataacaccccagttatcatgggatctgctttgtgtgctttggaatccagagaaccagaaattggtcaaaaagccattgaaaaattgttagatgccgtcgatgaatacattccaaccccagtcagagacttggaacaaccattcttgatgccagttgaagaagttttctccatttccggtagaggtaccgttgttgctggtagagtcgaaagaggtaccttgaagaagggtgaagaaatcgaaattgttggtggtttcgacaagccattcaaggccactgttactggtattgaaatgttcaagaaggaattggactccgctcttgctggtgacaactgtggtatcttgttgagaggtgtcaagagagacgaagttaagagaggtatggtcttgaccaagccaaacaccgtcacttcccacaagaagatcttggcctcgttgtatatcttgaccaaggaagaaggtggtagacactctccatttggagccaactacaagccccaattgttcatgagaaccaccgatgttaccggtaccatgaccttcccagaaggtgccgaccaatctgccatggtcatgccaggtgacaacgttgaaatgc

SEQ ID NO: 1564 - DNA, 1056 bp, Candida glabrata ATCC 66032
gatcacggtaagactacattgacagctgctatcaccaagacattggccaagaacggtggtgctgatttcttggactactcttccattgacaaagctccagaggagagagcccgtggtatcactatctctactgcccatgtcgagtacgagaccgccaagagacattactcccacgtcgactgtccaggtcacgccgactacatcaagaacatgattactggtgctgcccaaatggacggtgctatcatcgttgtcgccgccaccgatggtcaaatgccacaaactagagagcatttgctgttggccagacaagtcggtgttcaacgtatcgttgtctttgtcaacaaggtggacaccatcgatgaccctgaaatgttggaattagtggaaatggaaatgagagaattgttgaacgaatacggttttgacggtgacaatgcccctatcattatgggttccgctttgtgtgccctagaaggtcgtcaacctgaaattggtgagcaagctatcatgaaactattggacgctgttgatgaatacattccaaccccagaaagagacttgaacaagccattcttgatgcctgttgaagacatcttctccatctctggtagaggtaccgtcgtcactggacgtgtcgaaagaggtaacttgaagaagggtgaagaagttgaaattgttggtcacaacactaccccattgaagaccaccgttactggtatcgaaatgttcagaaaggaattggaccaagctatggctggtgacaacgccggtatcctattgagaggtatcagaagagaccaattgaagagaggtatggtcatggccaagccaggtaccgtcaaggctcacaccaagattttggcttctttgtacatcttgtctaaggaagaaggtggtagacattctggtttcggtgaaaactacagacctcagatgtttatcagaaccgcagatgtcactgttgtgatgaagttcccagaatctgtggaagaccactctatgcaagttatgccaggtgacaacgtcgaaatggtctgtgaactagtccaccca

SEQ ID NO: 1565 - DNA, 1061 bp, Candida guilliermondii ATCC 6260
gatcatggtaagaccactttgaccgctgctatcaccaaggttttgtcggaaaaaggaggtgctaatttcttggattacggctccatcgacagagctccagaagagagagccagaggtatcaccatttccactgcccatgttgagtaccaaactgataagagacattatgcccacgttgactgtccaggtcacgccgattacattaagaatatgattactggtgccgcccagatggacggtgccattattgttgttgctgccactgacggtcaaatgcctcagaccagagagcacttgttgttggccagacaagttggtgtgcaacacttggtagtttttgtgaacaaggtggacaccattgacgatcccgagatgttggaattggtcgagatggaaatgagagaattgttgagtcagtacggtttcgatggtgacaacaccccagttatcatgggatctgctttgtgtgctttggaaagtaagcagccagaaattggtgtgcaagccattgaaaaattgttggacgctgtcgatgagcacattcctactcctacccgtgacttggaacagccattcttgttgcctgttgaagatgtgttctccatttctggtagaggaactgtggttactggtagagtcgaaagaggttcgttgaagaagggtgaggaaatcgagattgttggtgactttgacaagccattcaagaccactgtgactggaattgaaatgttcaagaaggaattggatgctgctatggctggtgacaatgctggtatcttgttgagaggtgtcaagagagacgatgtcaagagaggtatggttttggccaagccttccaccgtcacttctcacaagaaggtgttggcttccttgtacatcttgagtaaggaagaaggtggccgtcactctccttttggtgagaactacaagcctcaattgttcatcagaactactgacgttaccggtactttaagattcccagccggcgagggtgtcgaccactcgcaaatggttatgccaggtgacaatgttgagatggaaattgagcttgtgagaaagac

SEQ ID NO: 1566 - DNA, 1073 bp, Candida haemulonii ATCC 22991
gatcacggtaagactaccttgactgctgctatcaccaaggttttggcttctaagggtggtgctagcttcttggactatggttccattgacagagccccagaggagagagctagaggtattactatttctactgcccacgttgagtaccaaaccgaaaagagacactacgcccacgtcgactgtccaggtcacgctgattacattaagaatatgattactggtgccgcccagatggacggtgctatcattgttgttgctgcttctgatggtcagatgcctcagaccagagagcaccttttgttggccagacaggttggtgttcagaacttggttgttttcgttaacaaggttgacaccattgacgaccctgaaatgttggaattggttgagatggaaatgagagaattgttgactacttacggttttgacggtgatgagactcctgttatcatgggttctgctttgtgcgctttggaagagaagcaaccagagattggtgagcaggctatcatgaagttgttggacgctgtcgatgagtacattccaaccccacagcgtgacttggagcagccattcttgatgcctgttgaggatgttttctccatttctggtagaggtactgtcgttactggtagagttgagagaggttctttgaagaagggtgaggaaatcgagattgtcggtgacttcgccaagactttcaaggctaccgttactggtattgagatgttcaagaaggaattggatgctgctatggctggtgacaacgccggtatcttgttgagaggtgtcaagagagatgagatctcccgtggtgatgtcttggccaagccaggtactgttactccacacaagaagatcttggcttctttgtacgttttgaccaaggaagaaggtggtcgtcacaacccattcgctgagaactacaagccacagttgttcctcagaaccaccaacgtcactggtaccatgagattcccagaaggtgaagatgttgaccactctgccatggttaacccaggtgacaacgttgagatggaaatcgagttgggtagaaaggccccacttgagtt

SEQ ID NO: 1567 - DNA, 1062 bp, Candida kefyr ATCC 28838
catggtaagaccactttgactgctgccatcaccaagactctagctgaacgtggtggtgctgactttttggactactcttctattgacaaggctccagaagaaagagcyagaggtatcactatttctactgctcatgttgaatacgagactgaaaagagacattactcccacgttgactgtccaggtcacgctgattacatcaagaacatgattactggtgctgctcaaatggacggtgctattattgttgttgctgctactgatggtcaaatgcctcaaaccagagagcatttgttgttggccagacaagttggtgtccaacacattgttgttttcgttaacaaggttgacaccatcgatgatccagaaatgttggaattggttgaaatggaaatgagagaattrttgactcaatatggctttgacggtgacaacactccagtgatcatgggttctgctttgtgtgccttggaaggtaagcaaccagaaattggtgagcaagccatcatgaagttgttggacgctgttgacgaatacatcccaaccccagcccgtgacttggaaaavccattcttgatgcctgttgaagatatcttctccatttccggtagaggtactgtcgtcactggtagagttgaacgtggtaacttgaagaagggtgaagaaatcgaaattgttggtcacaacaccactcctttcaagactactgttactggtattgaaatgttcagaaaggaattggaccaagccatggctggtgacaacgctggtgtccttttgagaggtgtcagaagagaccaattgaagagaggtatggttttggctaagccaggtactgttaaggcccacaccaagttcttggcttccttgtacattttgaccaaggaagaaggtggtagacactccggtttcggtgaaaactacagaccacaaatctacgtcagaactgctgacgttaccgtdgtcttgaagttcccagaatctgttgaagaccattccatgcaagtcatgccaggtgacaatgtcgaaatggagtgtgaattggttcacccaactccattg

SEQ ID NO: 1568 - DNA, 1062 bp, Candida lusitaniae ATCC 66035
cggaaagaccaccttgaccgccgccattaccaaggttttggctgacaagggtggcgccaacttcttggactacggtgccattgacaaggctcctgaagaaagagcacgtggtatcaccatttccactgcccacgttgaatacgagaccgacaacagacactacgcccacgttgactgtccaggtcacgccgattacatcaagaacatgatcacgggtgccgctcaaatggacggtgccattattgttgttgcagccaccgacggccaaatgcctcaaaccagagagcacttgttgttggccagacaagttggtgtgcaacacttggttgttttcgtgaacaaggttgataccatcgacgacccagaaatgttggaattggttgaaatggaaatgagagaattgttgactcaatacggatttgacggcgatgaaacccctgttgttatgggctctgctctttgcgctttggaaggtagagaaccagagattggtgagcaagccatcaccaagttgttggaggctgttgacgagtacatcccaaccccacaacgtgacttggaacaaccattcttgatgcctgttgaagatgttttctccatttctggtagaggtactgttgtcactggtagagtggagagaggttccttgaagaagggtgaggagatcgagattgttggtgactttgacaagcctttcaagactactgttactggtattgagatgttcaagaaggaattggacgctgctatggctggtgacaatgctggtatcttgttgagaggtgtcaagagagaacaagtttcccgtggtatggttttggccaagccaggcactgtgacctcgcacaagaaggttttggcttctttgtacattttgtctaaggaagaaggtggtcgtcactctccatttggcgagaactacaagcctcaattgttccttagaactaccgatgtcactggtactttgagattcccagcaggtgaggacgttgaccactccgctatggtttctccaggtgacaatgtcgagatggaaatcgagttggtcagaaagactcctct

SEQ ID NO: 1569 - DNA, 990 bp, Candida sphaerica ATCC 2504
tcaccaagactttggctgaacgtggtggtgctgatttcttggactactcttccattgacaaggctccagaagaaagagcragaggtatcactatttctactgcacatgttgaatatgaaactgacaagagacattactctcacgtcgactgtccaggtcatgctgattacatcaagaatatgattactggtgctgcccaaatggatggtgctatcattgttgttgctgctacagatggtcaaatgcctcaaaccagagaacatttgttgttggctagacaagttggtgttcaacayatcgttgttttcgttaacaaggttgacactatcgatgaccctgaaatgttagaattggttgaaatggaaatgagagaattattgacccaatacggtttcgatggtgacaacactccagtcatcatgggttctgctttgtgtgctttagaaggtaagcaaccagaaattggtgaacaagcaatcatgaagttattggacgctgttgacgaatacatcccaactccagctcgtgatttggaaaagcctttcttgatgcctgttgaagatatcttctccatctccggtagaggtaccgtcgtaactggtagagttgaacgtggtaacttgaakaagggtraagaaatcgaaatcgttggtcacaacaccactccattcaagaccactgttactggtattgaaatgttcagaaaggaattggaccaagctatggctggtgataacgctggtgtcwtgttgagaggtgtcagaagagaccaattaaagagaggtatggtcttggccaagccaggtactgtcaaggctcacaccraattcttggcctctttgtatatcttgaccaaggaagaaggtggtagacattccggtttcggtgaaaattacagacctcaaatctacgttagaactgctgatgtcaccgttgttttgaagttcccagaagctgttgaagatcactctatgcaagtcatgccaggtg

SEQ ID NO: 1570 - DNA, 1184 bp, Candida tropicalis ATCC 750
gatcatggtaaaaccactttgactgctgccattactaaagtcttggctgataaaggtcaagctaacttcttagattacggttctattgatagagctccagaagaaagagccagaggtatcaccatctctactgcccacgttgaatatgaaaccgaaaaaagacattacgcccatgttgagtatgtatacttttttttgttgtgtaattgttttaaagattttctttaaagctgaagaagtcaaatcagttctttgataacttctattaaaaaaagggaaaaattaacaagatatactaacactataacagttgtcctggacatcaagattatatcaagaatatgattaccggtgccgctcaaatggatggtgctattattgttgttgctgccactgatggtcaaatgccacaaaccagagaacatttgttgttggctagacaagtcggtgttcaagatttggttgtctttgttaacaaagtcgacactattgatgacccagaaatgttggaattggttgaaatggaaatgagagaattattgactacttacggttttgatggtgataacactcctgttatcatgggttctgctttgatggccttgcaaggtaaacaaccagaaattggtgaacaagctatcatgaaattgatggacgctattgatgaacacattccaaccccaaccagagacttggaacaatctttcttgatgccagttgaagatgttttctccatttctggtagaggtactgttgttactggtagagtcgaaagaggtgtcttaaagaagggtgaagaaattgaaattgttggtggtttcgaaaaaccattcaagaccactgttactggtattgaaatgttcaagaaagaattagatgctgctatggctggtgacaactgtggtgtcttgttgagaggtgtcaagagagacgaaatcaagagaggtatggttttggctaaaccaggtactgctacttcccacaagaaattcttggcttccatgtatatcttaactgctgaagaaggtggtcgttccactccattcggtgaaggttacaagccacaatgtttcttcagaactaacgatgttaccacttccttctctttcccagaaggtgaaggtgttgaccactcccaaatggttatgccaggtgacaacattgaaatggtcggtgaattgatt

SEQ ID NO: 1571 - DNA, 1071 bp, Candida viswanathii ATCC 28269
cgatcacggtaagaccaccttgaccgccgccatcaccaaggtcttggccgacaagggtcaggctaacttcttggactacggatccattgacagagcccctgaagaaagagcaagaggtatcactatctccactgcccacgttgaatacgagactgataagagacactatgcccacgttgattgcccgggccatcaagattatatcaagaatatgatcactggtgctgcccaaatggacggtgctatcattgttgttgctgctactgacggtcagatgccacaaaccagagaacacttgttgttggctagacaagttggtgtccaagacttggttgttttcgttaacaaggttgacactatcgatgacccagaaatgttggaattggttgaaatggaaatgagagaattattatcttcttayggctttgacggtgacaacaccccagttgtcatgggttccgctttgatggctttgcaaggtaagcaaccagaaattggtgaacaagctattattaagttgatggacgctattgatgaacacatyccaaccccaaccagagacttggaacaaccattcttgttgccagttgaagatgtcttttctatttccggtagaggtaccgtcgtcactggtagagtcgaaagaggtgtcttgaagaagggtgaagaaattgaaattgtcggtaactttgaaaagccattcaagaccaccgttactggtattgaaatgttcaagaaggaattggatgctgctatggctggtgacaactgtggtgtcttgttgagaggtgtcaagagagacgaaatcagcagaggtatggttttggccaagccaggtaccgtcacttcccacaagaagttcttggcctccatgtacatcttgactggtgaagaaggtggtcgtcgtaccccattcggtgaaggttacaagccacaatgtttcttcagaaccaatgacatcaccaccactttcactttcccagaaggtgaaggtgtcgaccactcccaaatggttatgccaggtgacaacatcgaaatggttggtgaattgtacaaggcttgtccttggaa

SEQ ID NO: 1572 - DNA, 817 bp, Alcaligenes faecalis subsp. faecalis ATCC 8750
tatcttggttwgctcggccgctgacggcccaatgcctcagactcgcgagcacatcctgctgagccgtcaggttggcgttccttacatcatcgtgttcctgaacaaggccgacatggttgatgacgaagagctgatcgaactggttgaaatggaagttcgcgagctgttgtccaagtacgacttccctggcgacgacaccccgatcatcaagggttcggccaaactggctctggaaggcgacgaaggcccactgggcagccaagccgttctggctctggccgaagcgctggacaactacattcctacgcctgagcgtgccgttgacggtacgttcctgatgcctgttgaagacgtgttctcgatctccggccgtggtacggttgtgaccggtcgtattgagcgcggcatcatcaaggtcggcgaagaaatcgaaatcgtgggtatcaaagacacggtcaagaccatttgtaccggcgttgaaatgttccgcaaactgctggaccagggcgaagctggcgataacgtcggtctgctgctgcgtggtaccaagcgtgaagacgtggaacgtggtcaagttctggccaagccaggctcgatcaagccacacactgacttcgacgccgaggtgtacattctgtccaaagaagaaggtggtcgtcacactcctttcttcaagggctaccgtcctcagttctacttccgtacaactgacgtgaccggcaccatcgagctgccagaagacaaggaaatggttctgccaggcgacaacatttcgatgaaagtgtccctgatcgctcctatcgccatggaagaaggt

SEQ ID NO: 1573 - DNA, 796 bp, Prevotella buccalis ATCC 35310
tatccttgtagttgctgctactgatggtcctatgccacagacacgtgagcacgtgcttttggctcgtcaggtaaacgttcctcgtttggttgtgttcatgaacaagtgtgacttggtagaagacgaagagatgcttgaactcgttgaaatggagttgcgcgaacttcttgagcaatacgaattcgaagaggatactccaatcgttcgtggttctgcactgggtgcattgaatggtgttgacaagtgggttgacagcgtgatgacgttgatggacactgttgacgagtggattcaagagccagagcgtgaccttgacaaacctttcttgatgccagtagaggacgtgttctctatcacaggtcgtggtaccgttgtaacaggacgtattgagactggtaaggtaaaggttggcgacgagattcagttgctcggtcttggtgaggacaagaagtctgttgtaacaggcgttgaaatgttccgtaagattctttctgaaggtgaagcaggtgataacgtaggacttttgctccgcggtatcgataaggatgaagtaaagcgtggtatggttgttgtacacccaggtgccatcactcctcacgatcacttcaaggcttccatctatgtattgaagaaggaagagggtggacgtcatactccattcggaaacaagtatcgtcctcagttctatctccgtacaatggactgtacaggtgagatcactttgccagaaggcgtagagatggtgatgcctggtgacaacgtagagattgaggttaccttgatttacaaggttgcc

SEQ ID NO: 1574 - DNA, 820 bp, Succinivibrio dextrinosolvens ATCC 19716
gctattctagtagtagcagcaactgatggtcctatgccacagacccgtgagcacatcctattagcacgtcaggtaggcgtaccatacatcatcgtattcctaaacaagtgcgatatggttgacgacgaggaattattagagttagttgagatggacgtacgtgatctattaaatcagtaccagttcccaggcgacgacactccaatcatccgtggttcagcactaggtgcattaaacggcgaagagaagtggaaagaggcaatctatcagttagcagacactctagattcatacattccagagccaaagcgtgatatcgatgatccattcctattaccaatcgaagatatcttctcaatctcaggtcgtggtactgtagtaaccggccgtgtagagcgtggtattgtacacgtaggtgacgaagttgaaatcgttggtattcgtccaaccaccaagaccactgtaactggcgttgaaatgttccgtaagttactagacgaaggtcgtgcaggtgataacgttggtgttctactacgtggtaccaagcgtgatgaggttgagcgtggtcaggttctagctgctccaggcacaatcactccacacaccaagttcactggtcaggtttacgtactaagcaaggatgaaggtggtcgtcacactccattcttcaagggctaccgtccacagttcttcttccgtacaaccgatattaccggttctatcgatctgaaagagggcgtagagatggtaatgccaggtgataacaccgacatgaccgtaaccctaatccacccagtagctatggctgaaggcgagagat

SEQ ID NO: 1575 - DNA, 803 bp, Tetragenococcus halophilus ATCC 33315
ggtagtgtctgcagctgacggcccaatgccacaaactcgtgaacatatcctattgtcacgtaacgttggtgtaccatacatcgttgtattcttaaacaaaatggatatggttgacgatgaagaattacttgaattagttgaaatggaagtacgtgatctattaactgaatacgacttcccaggtgatgatactcctgttatttctggttcagctttgaaagctttagaaggcgacgaagaatatgaacaaaaagtcttagacttaatggcagctgtagatgatttcatcccaactcctgaacgtgaccatgacaaaccgttcatgatgccgattgaagatgttttctcaatcactggtcgtggaactgttgctacaggtcgtgttgaacgtggaactattaaagtcggtgatgaagttgatatcatcggtattcatgaaaatgttaaaaagacaactgttacgggtgtagaaatgttccgtaaattgttggattacgctgaagctggcgataacatcggtacattattgcgtggtgtttctcgtgatgatatcgaacgtggtcaagtgttggctaaaccaggcacaatcacaccacatacaaaattctcagctgaagtttatgtattaacaaaagaagaaggcggacgtcatactccattcttctcaaactatcgcccacaattttacttccgtacaactgacatcactggtgtcattgaattgccagaaggtactgaaatggttatgccaggtgataacgtagcaatggaagttgaattaattcaccctgttgctattgaaa

SEQ ID NO: 1576 - DNA, 805 bp, Campylobacter jejuni subsp. jejuni ATCC 33292
ttaatgaagcaattgttgtaaattttgaaagcgaaggaaaaaaacataaacttgttttagaagtagcagctcatttaggagataatagagttagaactattgctatggatatgacagatggtttggtaaggggcttaaaagctgaggctttaggtgctcctattagtgttcctgttggtgagaaagttttaggaagaattttcaatgttactggagatttgatcgatgaaggtgaagaaatttcttttgataaaaaatgggcaattcatagagatccgccagcttttgaagatcaaagcacaaaaagtgagatttttgaaacagggattaaagttgtagatttgcttgctccttatgcaaaaggtggtaaagtaggtctttttggtggtgcaggtgttggtaaaactgttattattatggagcttattcacaatgttgcatttaagcatagcggctattctgtatttgcaggtgtgggtgagagaactcgtgaaggaaatgacctttataatgaaatgaaagaaagtaatgttttagacaaagttgctctatgttatggacaaatgaatgaaccaccaggagcaagaaatcgtattgctttaacaggtttaacaatggctgagtattttagagatgaaatgggtcttgatgtgcttatgtttattgataatatctttagattttcacaatcaggttctgaaatgtcagcacttttaggaagaattccatcagctgtgggttatcaaccaaccctagcaagtgaaatgggtaaattccaagaaagaattacttcaactaaaaaagg

SEQ ID NO: 1577 - DNA, 809 bp, Campylobacter rectus ATCC 33238
atttacccaagatcaacgaagccgtcgaagtaaatttcgaggttgagggcaagcaaaacagacttgtgttagaggttgccgcacaccttggcgataaccgcgtaagaacgatcgctatggatatgagcgaaggcttaaccagaggccttgaggctacggctcttggcgcgcctattagcgttccggtcggcgaaaaagttttgggaaggatttttaacgtcgtcggcgatctgatcgacgagggtgaaggcatagaatttgataaaaaatggtctatccaccgcgatcctccgccgtttgaagagcaaagcacgaagagtgaaatttttgaaacgggtataaaagtggtcgatcttctagccccttatgcaaaaggcggtaaggtcggattattcggcggtgccggcgtcggtaagacggttattatcatggagcttatccacaacgttgcatttaagcatagcggttattccgtgtttgccggcgtgggcgagcgaacccgcgaaggaaacgacctttatcacgagatgaaagagagtaacgttttggacaaagtcgccttgtgctacggccagatgaacgagccgccgggagcaagaaaccgcatcgctctaacaggcctaacgatggctgaatacttccgcgacgagatgggacttgacgttttgatgtttatagacaacatcttccgtttctctcagtctggcgctgagatgtcggcgcttcttggacgtatcccgtcagccgttggttatcagccgactttggcgagcgaaatgggcaaattccaagagagaattacatcaacc

SEQ ID NO: 1578 - DNA, 1671 bp, Enterococcus casseliflavus ATCC 25788
aatcgaagtgcaacgttcattgcgtgtacttgatggtgctgtaactgtgttggactcacaatcaggtgtagaacctcaaacagaaacagtttggcgtcaagcgacagattaccgcgtaccgcgtgttgtattctgtaacaaaatggacaaaattggtgcagacttcttatactctgtatcaactttacatgatcgtttacaagcaaatgctcacccaatccaattaccaattggtgcggaagatgactttactggtattatcgacttagtaaaaatgaaagctgaaatctacacaaatgacttaggaactgaaatccaagagactgaaattcctgaagaatacgtagaattagctgaagaatggcgcgaaaaattaattgaagctgttgctgatactgatgaagaactaatgatgaaattcttggaaggtgaagaaatcactgaagaagaattgaaagctggtattcgtcaagcaacattgactgttgactttttccctgttctttgcggatctgcctttaaaaacaaaggggttcaattgatgttggatgcagtcatcgactacttgccttcaccacttgatgttcctgcgattaaagggatcaatcctaaaacagacgaagaaactgatcgtccggctgacgatgaagcaccatttgcttcattagcatttaaagtaatgactgacccattcgtargtcgtttgacattcttycgtgtgtattcargtatcttgaactctggatcatacgtattgaatgcttcaaaaggcaaacgcgaacgtatcggtcggatcctacaaatgcacgccaacactcgtgctgaaatccaaacagtatactcaggcgatatcgccgctgctgttggtttgaaagacacaacaactggggatccactatgtgatgaaaaatccccagtaatccttgaatcaatcgaattcccagaaccagttatcgaagtcgctgttgagcttaaatcaaaagctgaccaagataaaatgggggttgctttacaaaaacttgctgaagaagatccatcattccgtgtggaamcaaacgctgaaacaggcgaaactgttatcgctggtatgggagaacttcacttggacgtcttagttgaccgtatgcgtcgcgaatttaaagttgaagcaaacgtaggtgcgcctcaagtttcttatcgtgaaacattccgtgcagcaacacaagcggaaggtaaatttgtacgtcagtctggtggtaaaggtcaatacggtcacgtatgggtcgaatttacaccaaacgaagaaggtaaaggcttcgaattcgaaaacgcgattgtcggtggtgtggttcctcgtgaatacatcccagcagttgaaaaaggacttgaagaatcaatggcgaacggtgtcttagccggttacccattagtagacatcaaagcaaaactttatgatggttcataccatgatgtcgattcaagtgaaactgccttccgtgttgcagcttctatggctttacgtgctgcagcgaagaaagcaaacccagtaattcttgaaccaatgatgaaagtagttatcactgtaccagaagattacttaggtgatgttatgggtcacgtaactgctcgtcgtggacgcgtagaaggaatggaagcacwcggtaactcacaaatcgtgaacgcaatcgtgcc

SEQ ID NO: 1579 - DNA, 1662 bp, Enterococcus gallinarum ATCC 49573
gaagtacaacgttcactacgggttcttgacggwgctgtaacagtattggactcacaatctggtgtagaaccacaaactgaaacagtttggcgtcaagcgacagattaccgcgtaccacgtatcgtattctgtaacaaaatggataaaatcggtgcagacttcttatactctgtatctactttacatgatcgcttgcaagcaaatgctcatccaatccaattaccaattggtgcggaagatgactttactggtatcatcgatctagtaaaaatgaaagctgagatctatacaaacgatttaggaacagagattcaagaaactgaaattcctgaagagtacaaagaattagctgaagaatggcgcgaaaaattagttgaagctgttgcagatactgacgaagagctaatgatgaaattcttggaaggtgaagaaatcactgaagaagaattgaaagctggtatccgtcaagcgacattgactgttgaatttttcccagttctttgtggttcagccttcaaaaacaaaggggttcaattgatgttggatgcagtcatcgactaccttccttcaccacttgatgttcctgcaatcaaagggatcaatcctaaaactgacgaagaaactgatcgtcctgctgacgatgaagcgccttttgcttcactagcatttaaagtaatgactgacccattcgtaggtcgtttgacattcttccgtgtgtattcaggtgtcttgaactctggatcatatgtcttgaatgcttcaaaagacaaacgcgaacgtatcggtcgtattctgcaaatgcacgcgaacacttgtgcagaaatccaaacagtttattcaggcgatatcgctgcagctgttggtttgaaagattccacaacaggggatacattgtgtgcgaaaaatcacccagtaatccttgaatcaatcgaattcccagamccagttatcgaagtagctgttgaacytaaatcaaaagctgaccaagataaaatgggtgtggctttacaaaaacttgctgaagaagatccttcattccgtgtagaamcaaacgctgaaactggcgaaactgttatcgcagggatgggtgaacttcacttggacgtccttgttgaccgtatgcgtcgcgaatttaaagttgaagcaaacgttggtgcgcctcaagtttcttaccgcgaaacattccgtgcttctacgcaagccgaaggtaaatttgtacgtcagtctggtggtaaaggtcaatacggtcacgtatggatcgaatttacaccaaacgaagaaggtaaaggcttcgaattcgaaaacgcaattgtcggtggtgtggttccacgtgaatacatcccagcagttgaaaaaggacttgaagactcaatggctaacggtgttctagctggttatccattggttgacatcaaagccaagctttacgatggttcataccatgatgtcgattcaagtgaaacagccttccgtgtggcagcttcaatggctttacgtgctgcagcgaagaaagctaatccagtgattcttgaaccaatgatgaaagttgttatcactgttcctgaagattacttaggtgatattatgggacacgtaactgctcgtcgtggacgtgttgaaggtatggaagcgcatggtaactcacaaatcgttaacgcgatt

SEQ ID NO: 1580 - DNA, 1669 bp, Streptococcus mitis ATCC 49456
caatcgaagtacaacgttctcttcgtgtattggatggtgctgttaccgttcttgactcacaatcaggtgttgagcctcaaactgaaacagtttggcgtcaagcaactgagtatggagttccacgtatcgtatttgccaacaaaatggacaaaatcggtgctgacttcctttactctgtaagcacacttcacgatcgtcttcaagcaaatgcacacccaatccaattgccaatcggttctgaagatgacttccgtggtatcatcgacttgatcaagatgaaagctgaaatctatactaacgaccttggtacagatatccttgaagaagacatcccagctgaataccttgaccaagctcaagaataccgtgaaaaattgatcgaagcagttgctgaaactgacgaagaattgatgatgaaatacctcgaaggtgaagaaatcactaacgaagaattgaaagctggtatccgtaaagcgactatcaacgttgaattcttcccagtattgtgtggctctgccttcaagaacaaaggtgttcaattgatgcttgatgcggttattgactaccttccaagcccacttgacatcccagcgatcaaaggtatcaacccagatwcagatgaagaagaaactcgtccagcatctgatgaagagccatttgcagctcttgccttcaagatcatgacagacccattcgtaagtcgtttgacattcttccgtgtttactcargtgktcttcaatcaggttcatacgtattgaacacttctaaaggkaaacgtgagcgtatcggacgtatccttcaaatgcacgccaacagccgtcaagaaattgacactggttactcaagagatatcgctgctgccgttggtttgaaagatactccaactggtgactcattgccagatgaaaaagctaaaatcattcttgagtcaatcaacgttccagamccagttatccaattgatggttgagccaaaatctaaagctgaccaagccaagatgggtatcgcccttcaaaaattggctgaagaagatccaacattccgcgttgaamcaaacgttgaaactggtgaamcagttatctctggtatgggtgagcttcaccttgacgtccttgttgaccgtatgcgtcgtgagttcaaagttgaagcaaacgtaggtgctcctcaagtatcttaccgtgaaacattccgcgcttctactcaagcacgtggattcttcaaacgtcagtctggtggtaaaggtcaattcggtgatgtatggattgaatttactccaaacgaagaaggtaaaggattcgaattcgaaaacgcaatcgtcggtggtgtggttcctcgtgaatttatcccagcggttgaaaaaggtttggtagaatctatggctaacggtgtacttgcaggttacccaatggttgacgttaaagctaagctttacgatggttcataccacgatgtcgactcatctgaaactgccttcaagattgcggcttcacttgctcttaaagaagctgctaaatcagcacaaccagctatccttgagccaatgatgcttgtaacaatcactgttccagaagaaaaccttggtgatgttatgggtcacgtaactgctcgtcgtggacgtgtagatggtatggaagcacwcggtaacagccaaatcgttcgtgcttacgt

SEQ ID NO: 1581 - DNA, 26 bp, Artificial Sequence
  Synthetic DNA Sequence
aattggggactacacctattatgatg

SEQ ID NO: 1582 - DNA, 23 bp, Artificial Sequence
  Synthetic DNA Sequence
ggcaaatcagtcagttcaggagt

SEQ ID NO: 1583 - DNA, 23 bp, Artificial Sequence
  Synthetic DNA Sequence
cgattggcaacaatacactcctg

SEQ ID NO: 1584 - DNA, 26 bp, Artificial Sequence
  Synthetic DNA Sequence
tcacctatttttacgcctggtaggac

SEQ ID NO: 1585 - DNA, 645 bp, Enterococcus faecium
atgactatacctgacgcaaatgcaatctatcctaactcagccatcaaagaggttgtctttatcaagaacgtgatcaaaagtcccaatattgaaattggggactacacctattatgatgacccagtaaatcccaccgattttgagaaacacgttacccatcactatgaatttctaggcgacaaattaatcatcggtaaattttgttctatcgccagtggcattgaatttatcatgaacggtgccaaccacgtaatgaaaggtatttcgacttatccatttaatattttaggtggcgattggcaacaatacactcctgaactgactgatttgccgttgaaaggtgatactgtagtcggaaatgacgtgtggtttgggcaaaatgtgaccgtcctaccaggcgtaaaaataggtgacggtgccattatcggagcaaatagtgttgtaacaaaagacgtcgctccatatacaattgtcggtggcaatccaattcaactcatcggaccaagatttgaaccggaagttattcaagcattagaaaatctggcatggtggaataaagatattgaatggataactgctaatgttcctaaactaatgcaaacaacacccacacttgaattgataaacagtttaatggaaaaataa

SEQ ID NO: 1586 - DNA, 26 bp, Artificial Sequence
  Synthetic DNA Sequence
attcccacaatcttttttatcaataa

SEQ ID NO: 1587 - DNA, 24 bp, Artificial Sequence
  Synthetic DNA Sequence
cattgttcagattcggtaaagttc

SEQ ID NO: 1588 - DNA, 25 bp, Artificial Sequence
  Synthetic DNA Sequence
gtttttgaagttaaatagtgttctt

SEQ ID NO: 1589 - DNA, 21 bp, Artificial Sequence
  Synthetic DNA Sequence
cttccatttgtactttcccta

SEQ ID NO: 1590 - DNA, 1920 bp, Unknown Organism
  Description of Unknown Organism: Cloning vector pFW16
atgaaaattattaatattggagttttagctcatgttgatgcaggaaaaactaccttaacagaaagcttattatataacagtggagcgattacagaattaggaagcgtggacaaaggtacaacgaggacggataatacgcttttagaacgtcagagaggaattacaattcagacaggaataacctcttttcagtgggaaaatacgaaggtgaacatcatagacacgccaggacatatggatttcttagcagaagtatatcgttcattatcagttttagatggggcaattctactgatttctgcaaaagatggcgtacaagcacaaactcgtatattatttcatgcacttaggaaaatggggattcccacaatcttttttatcaataagattgaccaaaatggaattgatttatcaacggtttatcaggatattaaagagaaactttctgccgaaattgtaatcaaacagaaggtagaactgtatcctaatgtgtgtgtgacgaactttaccgaatctgaacaatgggatacggtaatagagggaaacgatgaccttttagagaaatatatgtccggtaaatcattagaagcattggaactcgaacaagaggaaagcataagatttcagaattgttctctgttccctctttatcatggaagtgcaaaaagtaatatagggattgataaccttatagaagttattactaataaattttattcatcaacacatcgaggtccgtctgaactttgcggaaatgttttcaaaattgaatatacaaaaaaaagacaacgtcttgcatatatacgcctttatagtggagtactacatttacgagattcggttagagtatcagaaaaggaaaaaataaaagttacagaaatgtatacttcaataaatggtgaattatgtaagattgatagagcttattctggagaaattgttattttgcaaaatgagtttttgaagttaaatagtgttcttggagatacaaaactattgccacagagaaaaaagattgaaaatccgcaccctctactacaaacaactgttgaaccgagtaaacctgaacagagagaaatgttgcttgatgcccttttggaaatctcagatagtgatccgcttctacgatattacgtggattctacgacacatgaaattatactttctttcttagggaaagtacaaatggaagtgattagtgcactgttgcaagaaaagtatcatgtggagatagaaataacagagcctacagtcatttatatggagagaccgttaaaaaatgcagaatataccattcacatcgaagtgccgccaaatcctttctgggcttccattggtctatctgtatcaccgcttccgttgggaagtggaatgcagtatgagagctcggtttctcttggatacttaaatcaatcatttcaaaatgcagttatggaagggatacgctatggttgtgaacaaggattgtatggttggaatgtgacggactgtaaaatctgttttaagtatggcttatactatagccctgttagtaccccagcagattttcggatgcttgctcctattgtattggaacaagtcttaaaaaaagctggaacagaattgttagagccatatcttagttttaaaatttatgcgccacaggaatatctttcacgagcatacaacgatgctcctaaatattgtgcgaacatcgtagacactcaattgaaaaataatgaggtcattcttagtggagaaatccctgctcggtgtattcaagaatatcgtagtgatttaactttctttacaaatggacgtagtgtttgtttaacagagttaaaagggtaccatgttactaccggtgaacctgtttgccagccccgtcgtccaaatagtcggatagataaagtacgatatatgttcaataaaataacttag

SEQ ID NO: 1591 - DNA, 20 bp, Artificial Sequence
  Synthetic DNA Sequence
atgaggtaatagaacggatt

SEQ ID NO: 1592 - DNA, 21 bp, Artificial Sequence
  Synthetic DNA Sequence
cagtatttcagtaagcgtaaa

SEQ ID NO: 1593 - DNA, 36 bp, Artificial Sequence
  Synthetic DNA Sequence
  modified_base (29): i
ccgagcgatttaccggatacttggctgcncgctcgg

SEQ ID NO: 1594 - DNA, 1032 bp, Enterococcus faecium strain N97-330
atgtttagaattaaagttgcagttctgtttgggggctgttcagaggaacataatgtttcgataaaatctgcgatggagattgccgcaaacatagatacaaaaaagtatcagccttattatattggaatcacaaaatccggcgtttggaaaatgtgtgaaaaaccttgtttggagtgggaacaatatgcgggggatccggttgttttttcaccggacagaagtacgcatggtctgctgatacaaaaagacactgggtatgaaatccagcctgtggatgtgggattaccgatgattcatggcaagtttggcgaggatggctccatacaaggcttgcttgaattgtcaggcattccgtatgtgggatgcgatattcaaagctccgtgacctgcatggataaggcgcttgcatataccgttgtgaaaaatgcgggtatcgctgtgcctgggttccggatccttcaggagggggatcgcctggaaacagaggatttcgtatatcccgtttttgtaaagcctgcccgttccggctcatcctttggcgtaaacaaggtatgcaaggcagaagaactgcaggcagcaatcgaagatgcaagaaaatatgacagcaagattttgattgaagaggccgttaccgggagtgaggtaggctgcgccatactgggaaacggaaatgatctcatggctggcgaggtggatcagattgagctgagacacggcttttttaagattcatcaggaagcacagccggagaaaggatctgaaaatgcagtcatccgagttccagccgccttaccggatgaggtaatagaacggattcagaaaacagcaatgaagatttaccggatacttggctgcagaggattggcccgcattgacctgtttttgcgggaggacggctgcattgtgttgaatgaagtgaataccatgccgggttttacttcctacagccgttatccccgcatgatgacagcagccggttttacgcttactgaaatactggatcgcttgattgaactttcacttaggaggtaa

SEQ ID NO: 1595 - DNA, 25 bp, Artificial Sequence
  Synthetic DNA Sequence
aaataatgctccatcaatttgctga

SEQ ID NO: 1596 - DNA, 24 bp, Artificial Sequence
  Synthetic DNA Sequence
atagtcgaaaaagccatccacaag

SEQ ID NO: 1597 - DNA, 24 bp, Artificial Sequence
  Synthetic DNA Sequence
gatgaatttgcgaaaatacatgga

SEQ ID NO: 1598 - DNA, 23 bp, Artificial Sequence
  Synthetic DNA Sequence
cagccaatttctacccctttcac

SEQ ID NO: 1599 - DNA, 604 bp, Enterococcus faecalis strain BM4405
cagggagtatttgagttattagatattccatatgtaggttgtggtatcggagctgcagcaatttccatgaataaaataatgctccatcaatttgctgaaatagttggtgtaaaaagcactcctagtatgattatagaaaagggacaagacctacaaaaagtcgatgaatttgcgaaaatacatggatttcctttatatatcaaaccgaatgaggcaggctcatcaaaaggaattagcaaggtagaacaaaaaagtgatttatataaagcaatagacgaagcttcaaaatatgatagccgtattttaattcaaaaggaagtgaaaggggtagaaattggctgtgggattttagggaatgaacaattggtcgttggagaatgtgatcaaattagtcttgtggatggctttttcgactatgaagagaaatacaatttagtaacagcagaaattttgttaccagctaaactatcaatagacaaaaaagaagacatccagataaaagcaaaaaaactatacagactattagggtgcaaaggattagcgagaatcgactttttcttaacggatgacggagaaattttattaaatgagatcaacaccctcc

SEQ ID NO: 1600 - DNA, 805 bp, Campylobacter jejuni subsp. doylei ATCC 49349
acctcaaattaatgaagcaattgttgtaaattttgaaagcgaaggaaaaaaacataaacttgttttagaagtagcagctcatttaggagataatagagttagaactattgctatggatatgacagatggtttggtaaggggcttaaaagctgaggctttaggtgctcctattagtgttcctgttggtgagaaagttttaggaagaattttcaatgttactggagatttgatcgatgaaggtgaagaaattccttttgataaaaaatgggcaattcatagagatccgccagcttttgaagatcaaagcacaaaaagtgagatttttgaaacagggattaaagttgtagatttacttgctccttatgcaaaaggtggtaaagtaggtctttttggtggtgcaggtgttggtaaaactgttattattatggagcttattcacaatgttgcatttaagcatagcggctattctgtatttgcaggtgtgggtgagagaactcgtgaaggaaatgacctttataatgaaatgaaagaaagtaatgttttagacaaagttgctctatgttatggacaaatgaatgaaccaccaggagcaagaaatcgtattgctttaacaggtttaacaatggctgagtattttagagatgaaatgggtcttgatgtgcttatgtttattgataatatctttagattttcacaatcaggttctgaaatgtcagcacttttaggaagaattccatcagctgtgggttatcaaccaaccctagcaagtgaaatgggtaaattccaagaaagaattacttcaact

SEQ ID NO: 1601 - DNA, 826 bp, Enterococcus sulfureus ATCC 49903
ctccttaccagatatcaacaatgcgctggttgtatataaaaatgatgccaataaaacaaaagttgttttagaagcagcgttagaattaggtgacggaatcattcgtgcgattgcaatggaatcgactgatggattgcaacgtgggatggaagttgtcgatatgggagaatctatttctgtaccagttggaacagaaactttaggacgtgtgtttaatgtattaggagatacgattgacttagaagctccttttcctaaagatgcaccgcgtagtggaatccataaaaaagcccctaattttgatgaattaagtacaagcacagaaattctagaaacagggatcaaagtcatcgatctattagccccttatttaaaaggtggtaaagttggattgtttgggggagccggtgtaggaaaaacggtattgattcaagagttgattcacaatatcgcacaagaacacggtgggatttcggtctttactggtgttggtgagcgtacacgtgaaggaaacgatttgtattatgaaatgaaagattcaggagtcattgaaaaaacagcgatggtgtttggacaaatgaatgagccacctggtgcacggatgcgtgtagccttgactggattaacgattgctgaatatttccgtgatgttgaaggacaggatgtactgttgtttatcgacaatatcttccgttttacacaagctggttctgaagtgtctgccttgttaggtcgtatgccatcagctgtgggatatcaaccaacattagctaccgaaatggggcaattgcaagagcggatcacgtcaacgaaaaaaggatcgatc

SEQ ID NO: 1602 - DNA, 833 bp, Enterococcus solitarius ATCC 49428
tgatactttaccagatattaataatgcattagtagtatataaaaaggacgaggacaagacacgcgttgtcttagaagccaccttggaacttggagatggcatgattcgtgcaatctctatgggatcgactgatggcttgcaacggggaatggaagttgtggacacacaagcacctatttctgttccagtaggaaatgaaaccttaggacgtgtttttaatgtcttaggagaaacgattgataaacaggcaccgtttcctgaagatgccaaaaaaagtggtattcataaaaaagcacccgcttttgatgaattaagtaccagttctgaaatattggaaaccgggattaaagtaatcgatttgctagctccttatttacgaggtggtaaagttggattatttggcggtgctggcgtgggtaaaacggtattaattcaagaattaattcataacgttgcccaagaacatgggggaatttctgtttttacgggtgtcggagagcgtactcgtgaaggaaatgacctatattatgaaatgcaggattcaggcgttattgaaaaaacggctatggtatttggacaaatgaacgaaccccctggtgcacgtatgcgtgtagcgttaactggtttgacacttgctgagtacttccgtgatgtacaaggtcaagacgtattattatttatagataatattttccgctttactcaagcaggaacagaagtatctgctttattaggacggatgccgtctgccgttggttaccaaccaactctagcaacggaaatgggacagttgcaagaacgaatcacatcgacagataaaggatcaattacct

SEQ ID NO: 1603 - DNA, 806 bp, Campylobacter sputorum subsp. sputorum ATCC 35980
atcagcctaaaattaacgaagcaatagaagttaattatgaattagatggtaaaaaaataagacttattcttgaagtagctggacatcttggcgataatagagcaagaaccattgctatggatatgagtgatggtttacaaagaggattagaagttacggctcttggtgctcctataacagttcctgttggagataaagttttaggtagaatgtttaatgttgtaggtgacttaatagatgaaggtgaagtaacagattttgataaaagatgggctatccatagagatcctccttcgtttgaagatcaaagtacaaaaagtgaaatttttgaaacaggtataaaagtagttgatcttcttgcaccttatgcaaaaggtggtaaagttggcttatttggtggtgctggcgttggaaaaacagttatcataatggagcttatacataatgttgcatttaaacacagcggttattcaatttttgccggtgttggagagagaacaagagagggaaatgatctttataatgagatgaaagagtctggtgttttggataaagttgccttatgttatggacaaatgaatgaaccaccaggagcaagaaaccgtatagcattaacaggtcttacaatggctgaatatttccgtgatgaaatggggcttgatgtgttgatgtttatagataatatttttagattttctcaatcaggttctgaaatgtcagcgctgcttggtagaattccatctgctgttggttatcaaccaacattagcaagtgagatgggaaaacttcaagaaagaattacttcc

SEQ ID NO: 1604 - DNA, 738 bp, Enterococcus pseudoavium ATCC 49372
ggtgttatccgcacaatcgctatggaatctacagatggattgcaacgggggatggaagttgtcgataccggcaaaccaatctctgttcctgtaggtaaagaaacattaggtcgtgtgtttaacgtattaggtgaaacgatcgacaaagaagcaccttttccagaagatgtagaaaagagcggtattcacaaaaaggcccccgcttttgaagaccttagcaccagtaatgagattttagaaactgggatcaaggttatcgacttattagccccttacttaaaaggtggtaaagttggactattcggtggtgccggtgttggtaaaaccgtcttaattcaagaactgattcataatatcgcccaagaacacggtgggatttctgtctttaccggggttggggaacggactcgtgaagggaacgacctttattatgaaatgaaagaatccggcgttattgaaaaaacagcgatggtcttcggacaaatgaatgagccaccaggtgcgcggatgcgcgttgccttgactggtttgacattagctgaatatttccgtgatgaagaaggtcaagatgtgttgctatttatcgataacattttccgcttcacacaagccggatcagaagtttcggcgctattaggtcggatgccatctgccgttggttatcaaccaaccttggcaacagaaatgggtcaattacaagaacgaatcacttcaacgaaaaaaggctcaattacatcg

SEQ ID NO: 1605 - DNA, 20 bp, Artificial Sequence
  Synthetic DNA Sequence
  modified_base (12): i
  modified_base (18): i
atyatygaartntaygcncc

SEQ ID NO: 1606 - DNA, 23 bp, Artificial Sequence
  Synthetic DNA Sequence
  modified_base (9): i
  modified_base (12): i
  modified_base (15): i
ccraacatnaynccnactttttc

SEQ ID NO: 1607 - DNA, 336 bp, Klebsiella ornithinolytica ATCC 31898
ctggattatgcgatgtcggtcattgttggccgtgcgctgccggatgtccgagatggcctgaaaccggtacaccgtcgcgtactttacgccatgaacgtattgggcaatgactggaacaaagcctataaaaaatccgcccgtgtcgttggtgacgtaatcggtaaataccaccctcatggtgataccgccgtttatgacaccattgtacgtatggcacagccattctccttgcgttatatgctggtcgatggccagggtaacttcggttctgtcgatggcgactccgccgcagcgatgcgttatacggaaatccgtatgtcgaaaatcgcccacgag

SEQ ID NO: 1608 - DNA, 341 bp, Klebsiella oxytoca ATCC 13182
ctatctggattatgcgatgtcggtcattgttggccgtgcgctgccggatgtccgagatggcctgaagccggtacaccgtcgcgtactatacgccatgaacgtattgggcaatgactggaacaaagcctataaaaaatctgcccgtgtcgtgggtgacgtcatcggtaaataccaccctcatggtgatactgccgtatacgacaccattgtacgtatggcgcagccattctccctgcgttacatgctggtagatggccagggtaactttggttcggtcgacggcgactccgccgcagcgatgcgttatacggaaatccgtatgtcgaagatcgcccatgaac

SEQ ID NO: 1609 - DNA, 22 bp, Artificial Sequence
  Synthetic DNA Sequence
gccctgatccaaatagcatata

SEQ ID NO: 1610 - DNA, 23 bp, Artificial Sequence
  Synthetic DNA Sequence
cctggcataacagtaacattctg

SEQ ID NO: 1611 - DNA, 22 bp, Artificial Sequence
  Synthetic DNA Sequence
tgggaaaaagcaactccatctc

SEQ ID NO: 1612 - DNA, 23 bp, Artificial Sequence
  Synthetic DNA Sequence
acaactgaattcgcagcaacaat

SEQ ID NO: 1613 - DNA, 639 bp, Staphylococcus aureus
atgaaatatggccctgatccaaatagcatatatccacatgaagaaataaaaagtgtttgttttattaaaaatacaattaccaatccaaatattatagttggagattatacttactattccgatgttaacggagctgaaaaatttgaagaacatgtgacacatcattatgaatttaggggtgataaacttgtaattggcaagttttgtgcaatagctgaaggtatagaatttattatgaatggagcaaaccatagaatgaattcaataacaacttatccttttaatataatgggaaatggttgggaaaaagcaactccatctcttgaagatttaccatttaagggagatactgttgttggaaatgatgtgtggattggtcagaatgttactgttatgccaggaattcaaataggagatggagcaattgttgctgcgaattcagttgttacaaaagatgtaccaccatatcgtattattggtggaaatccgagtagaattataaagaaaaggtttgaagatgaattgatagattatttattgcaaataaaatggtgggattggtcagcacaaaaaatattttctaatcttgaaacactttgtagctctgatttagagaaaataaaatctattcgagattag

SEQ ID NO: 1614 - DNA, 22 bp, Artificial Sequence
  Synthetic DNA Sequence
ccaatccagaagaaatataccc

SEQ ID NO: 1615 - DNA, 24 bp, Artificial Sequence
  Synthetic DNA Sequence
attagtttatccccaatcaattca

SEQ ID NO: 1616 - DNA, 26 bp, Artificial Sequence
  Synthetic DNA Sequence
ataatgaatggggctaatcatcgtat

SEQ ID NO: 1617 - DNA, 24 bp, Artificial Sequence
  Synthetic DNA Sequence
gccaacaactgaataaggatcaac

SEQ ID NO: 1618 - DNA, 639 bp, Staphylococcus cohnii
atgaaatggcaaaatcagcaaggccccaatccagaagaaatataccctatagaaggtaataaacatgttcaatttattaaaccatctataacaaagcccaatattttagttggggaatattcatattacgatagtaaagatggtgaatcttttgaaagccaagttctttatcactatgaattgattggggataaactaatattagggaagttttgttctattggacccggaacgacatttataatgaatggggctaatcatcgtatggatggttcaacatttccattcaatcttttcggaaatggttgggagaagcatacccctacattggaagaccttccttataagggtaacacggaaattgggaacgatgtttggattggacgagatgtgacaattatgcccggtgtaaaaataggaaacggggctattattgcagcaaaatcggttgtgacaaagaacgttgatccttattcagttgttggcggtaatccttcacgattaattaagataaggttttccaaggaaaaaatcgcagcattactaaaagtaaggtggtgggacctagagatagagacgataaatgaaaatattgattgcatcctgaatggtgatataaaaaaggttaaaagaagttag

SEQ ID NO: 1619 - DNA, 24 bp, Artificial Sequence
  Synthetic DNA Sequence
aaggcaaaataaaaggagcaaagc

SEQ ID NO: 1620 - DNA, 23 bp, Artificial Sequence
  Synthetic DNA Sequence
tgtacccgagacatcttcaccac

SEQ ID NO: 1621 - DNA, 26 bp, Artificial Sequence
  Synthetic DNA Sequence
aattgaaggacgggtattgtggaaag

SEQ ID NO: 1622 - DNA, 26 bp, Artificial Sequence
  Synthetic DNA Sequence
cgattttgacagatggcgataatgaa

SEQ ID NO: 1623 - DNA, 1569 bp, Staphylococcus aureus
atgaaaataatgttagagggacttaatataaaacattatgttcaagatcgtttattgttgaacataaatcgcctaaagatttatcagaatgatcgtattggtttaattggtaaaaatggaagtggaaaaacaacgttacttcacatattatataaaaaaattgtgcctgaagaaggtattgtaaaacaattttcacattgtgaacttattcctcaattgaagctcatagaatcaactaaaagtggtggtgaagtaacacgaaactatattcggcaagcgcttgataaaaatccagaactgctattagcagatgaaccaacaactaacttagataataactatatagaaaaattagaacaggatttaaaaaattggcatggagcatttattatagtttcacatgatcgcgcttttttagataacttgtgtactactatatgggaaattgacgagggaagaataactgaatataaggggaattatagtaactatgttgaacaaaaagaattagaaagacatcgagaagaattagaatatgaaaaatatgaaaaagaaaagaaacgattggaaaaagctataaatataaaagaacagaaagctcaacgagcaactaaaaaaccgaaaaacttaagtttatctgaaggcaaaataaaaggagcaaagccatactttgcaggtaagcaaaagaagttacgaaaaactgtaaaatctctagaaaccagactagaaaaacttgaaagcgtcgaaaagagaaacgaacttcctccacttaaaatggatttagtgaacttagaaagtgtaaaaaatagaactataatacgtggtgaagatgtctcgggtacaattgaaggacgggtattgtggaaagcaaaaagttttagtattcgcggaggagacaagatggcaattatcggatctaatggtacaggaaagacaacgtttattaaaaaaattgtgcatgggaatcctggtatttcattatcgccatctgtcaaaatcggttattttagccaaaaaatagatacattagaattagataagagcattttagaaaatgttcaatcttcttcacaacaaaatgaaactcttattcgaactattctagctagaatgcatttttttagagatgatgtttataaaccaataagtgtcttaagtggtggagagcgagttaaagtagcactaactaaagtattcttaagtgaagttaatacgttggtactagatgaaccaacaaactttcttgatatggaagctatagaggcgtttgaatctttgttaaaggaatataatggcagtataatctttgtatctcacgatcgtaaatttatcgaaaaagtagccactcgaataatgacaattgataataaagaaataaaaatatttgatggcacatatgaacaatttaaacaagctgaaaagccaacaaggaatattaaagaagataaaaaacttttacttgagacaaaaattacagaagtactcagtcgattgagtattgaaccttcggaagaattagaacaagagtttcaaaacttaataaatgaaaaaagaaatttggataaataa

SEQ ID NO: 1624 - DNA, 26 bp, Artificial Sequence
  Synthetic DNA Sequence
ttctttaatgctcgtagatgaaccta

SEQ ID NO: 1625 - DNA, 25 bp, Artificial Sequence
  Synthetic DNA Sequence
ttttcgtattcttcttgttgctttc

SEQ ID NO: 1626 - DNA, 26 bp, Artificial Sequence
  Synthetic DNA Sequence
aggaatgattaagcccccttcaaaaa

SEQ ID NO: 1627 - DNA, 26 bp, Artificial Sequence
  Synthetic DNA Sequence
ttacattgcgaccatgaaattgctct

SEQ ID NO: 1628 - DNA, 1658 bp, Staphylococcus aureus
atgcttaaaatcgacatgaagaatgtaaaaaaatattatgcagataaattaattttaaatataaaagaactaaagatttatagtggggataaaataggtattgtaggtaagaatggagttggcaaaacaacacttttaaaaataataaaaggactaatagagattgacgaaggaaatataattataagtgaaaaaacaactattaaatatatctctcaattagaagaaccacatagtaagataattgatggaaaatatgcttcaatatttcaagttgaaaataagtggaatgacaatatgagtggtggtgaaaaaactagatttaaactagcagagggatttcaagatcaatgttctttaatgctcgtagatgaacctacaagtaatttagatatcgaaggaatagagttgataacaaatacttttaaagagtaccgtgatacttttttggtagtatctcatgatagaatttttttagatcaagtttgtacaaaaatttttgaaattgaaaatggatatattagagaattcatcggtaattatacaaactatatagagcaaaaagaaatgcttctacgaaagcaacaagaagaatacgaaaagtataattctaaaagaaagcaattggagcaagctataaagctaaaagagaataaggcgcaaggaatgattaagcccccttcaaaaacaatgggaacatctgaatctagaatatggaaaatgcaacatgctactaaacaaaaaaagatgcatagaaatacgaaatcgttggaaacacgaatagataaattaaatcatgtagaaaaaataaaagagcttccttctattaaaatggatttacctaatagagagcaatttcatggtcgcaatgtaattagtttaaaaaacttatctataaaatttaataatcaatttctttggagagatgcttcatttgtcattaaaggtggagaaaaggttgctataattggtaacaatggtgtaggaaaaacaacattgttgaagctgattctagaaaaagtagaatcagtaataatatcaccatcagttaaaattggatacgtcagtcaaaacttagatgttctacaatctcataaatctatcttagaaaatgttatgtctacctccattcaagatgaaacaatagcaagaattgttctagcaagattacatttttatcgcaatgatgttcataaagaaataaatgttttgagtggtggagaacaaataaaggttgcttttgccaagctatttgttagcgattgtaatacattaattcttgatgaaccaacaaactatttggatatcgatgctgttgaggcattagaagaattgttaattacctatgaaggtgttgtgttatttgcttcccatgataaaaaatttatacaaaacctagctgaacaattgttaataatagaaaataataaagtgaaaaaattcgaaggaacatatatagaatatttaaaaattaaagataaaccaaaattaaatacaaatgaaaaagaactcaaagaaaaaaagatgatactagaaatgcaaatttcatcattattaagtaaaatctcaatggaagaaaatgaagaaaaaaacaaagaattagatgaaaagtacaaattgaaattaaaagaattgaaaagcctaaataaaaatattta

SEQ ID NO: 1629 - DNA, 26 bp, Artificial Sequence
  Synthetic DNA Sequence
aaggggaaagtttggattacacaaca

SEQ ID NO: 1630 - DNA, 24 bp, Artificial Sequence
  Synthetic DNA Sequence
gaaccacagggcattatcagaacc

SEQ ID NO: 1631 - DNA, 21 bp, Artificial Sequence
  Synthetic DNA Sequence
cgacgatgctttatggtttgt

SEQ ID NO: 1632 - DNA, 26 bp, Artificial Sequence
  Synthetic DNA Sequence
gttaatttgcctatcttgtcacactc

SEQ ID NO: 1633 - DNA, 900 bp, Staphylococcus aureus
atggaatttaaattacaagaattaaatcttactaaccaagatacaggaccatatggtataaccgtttcagataaggggaaagtttggattacacaacataaagcaaatatgataagttgcatcaatttagatggaaaaattacagagtacccactaccgacaccagatgcaaaagtcatgtgtttaactatatcctcagatggggaagtttggtttactgagaatgcagcaaacaaaatagggaggattacaaaaaaagggattattaaggaatatacattgcctaacccagattcagcaccctacggtattacagaaggaccaaatggagatatatggtttacagaaatgaatggcaaccgtattggacgtattacggacgacggtaaaattcgtgaatacgagctgcctaataaaggatcttacccttcttttatcactttgggttctgataatgccctgtggttcacagaaaatcaaaataatgctattggtagaattacagaaagtggggatattacagagtttaaaattcctacacctgcatcaggaccagttggtattacaaaggggaacgacgatgctttatggtttgtggaaattatcggtaataagatagggcgaataactcctctgggggaaattaccgaattcaaaattccaacgccaaacgctcgacctcatgcaattactgctggagcaggaattgatttatggtttactgaatggggggctaataaaataggaaggctgacaagcaataatataattgaggaatacccaattcaaatcaaaagtggtgaaccacatggcatttgtttcgatggtgaaacaatttggtttgcaatggagtgtgacaagataggcaaattaactctcattaaggataatatggagtga

SEQ ID NO: 1634 - DNA, 25 bp, Artificial Sequence
  Synthetic DNA Sequence
ttaacttgtctattcccgattcagg

SEQ ID NO: 1635 - DNA, 23 bp, Artificial Sequence
  Synthetic DNA Sequence
gctgtggcaatggatattctgta

SEQ ID NO: 1636 - DNA, 24 bp, Artificial Sequence
  Synthetic DNA Sequence
ttcctacccctgatgctaaagtga

SEQ ID NO: 1637 - DNA, 23 bp, Artificial Sequence
  Synthetic DNA Sequence
caaagtgcgttatccgaacctaa

SEQ ID NO: 1638 - DNA, 527 bp, Aspergillus fumigatus strain WSA-172
ggtggggaagactgtcttcatccaggaattgattgtgagtcgttccacatgctcacctagttttcgctcgatcttttcactaacgcaaaccatgtagaacaacattgccaaggcccacggtggttactccgtcttcactggtgttggtgagcgtactcgtgagggtaacgatctgtaccacgaaatgcaggagactggtgtcattcagctcgagggtgaatccaaggtcgcactggtgttcggacagatgaacgagccccccggtgcccgtgcccgtgtcgcccttaccggtctgaccattgccgagtacttccgtgacgaggagggtcaggacgtgctgctcttcattgacaacattttccgtttcacccaggccggttctgaggtgtctgcccttctcggtcgtatcccctctgccgtcggttaccagcccaccctggccgtcgacatgggtggtatgcaggagcgtatcaccaccaccaagaagggttctattacctccgtccargccgtctacgtccccgcga

SEQ ID NO: 1639 - DNA, 452 bp, Aspergillus fumigatus ATCC 64746
actgtcttgattcaagaacttattaacaacattgctaaagcccatggtggttactctattttctgtggtgttggtgaacgtactcgtgaaggtaacgatttataccacgaaatgatggaaactggtgtcattaaacttgaaggtgactccaagtgtgctcttgtattcggtcaaatgaacgaacctcctggtgctcgtgcccgtgttgctttaactggtttaaccattgctgaatacttccgtgatgaagaaggtcaagatgtgttacttttcattgataacattttccgtttcactcaagctggttctgaagtatctgcccttttaggtcgtattccatctgctgtaggttaccaacccactttatctactgatatgggtggtatgcaagaacgtattactactaccaagaatggttccattacctctgtacargccgtctacgtccccgc

SEQ ID NO: 1640 - DNA, 783 bp, Bacillus mycoides ATCC 6462
acgcccttacggtaaaacaaagcaacgaaaacggaagcatgaacttaacatttgaagttgcacttcatttaggtgatgatacagttcgtacagttgcgatgtcttccacagatggacttgttcgtggcacagaagtagaagatactggtaaagcaatctctgtaccagttggtgatgcaacacttggtcgtgtattcaacgtattaggtgatgcaattgacttagatggtgaacttcctgcggatgtacaccgtgatccaattcaccgtcaagcacctgcattcgaagaattatctactaaagtagaaattcttgaaactggtattaaagtagtagacttacttgctccttacattaagggtggtaagatcggcctattcggtggtgccggcgtaggtaaaacagtattaattcaagaattaattaacaacatcgcacaagagcacggtggtatctctgtattcgctggtgtaggtgagcgtactcgtgagggtaatgacttataccatgaaatgagcgattctggcgtaatcaagaaaactgcgatggtattcggacaaatgaatgagccacctggagcacgtcaacgtgttgcattaacaggtttaacaatggctgagcatttccgtgatgagcaaggacaagacgtacttctgttcatcgataacatcttccgtttcacgcaagcgggttctgaagtatctgcccttcttggtcgtatgccatctgcggtaggttaccaaccaacacttgcaacagaaatgggtcaattacaagagcgta

SEQ ID NO: 1641 - DNA, 823 bp, Bacillus mycoides NRRL NRS-319
atctacaacgcccttacggtaaaacaaagcaacgaaaacggagcaagcattaacttaacatttgaagttgcacttcatttaggtgatgacacagttcgtacagttgcaatgtcttccacagatggacttgttcgtggcacagaagtagaagatactggtaaagcaatctctgtaccagttggtgatgcaacacttggtcgtgtattcaacgtattaggtgatgcaattgacttagatggtgatgttcctgcggatgtacgtcgtgatccaattcaccgtcaagcacctgcattcgaagaactatctactaaagtagaaattcttgaaactggtattaaagtagtagacttacttgctccttacattaagggtggtaagatcggtctattcggtggtgccggtgtaggtaaaacagtattaattcaggaattaattaacaacatcgcacaagaacacggtggtatctctgtattcgctggtgtaggtgagcgtactcgtgagggtaacgacttataccatgaaatgagcgattctggcgtaattaagaaaactgcgatggtattcggacaaatgaatgagccacctggagcacgtcaacgtgttgcattaacaggtttaacaatggctgaacatttccgtgatgagcaaggacaagacgtactattgttcatcgataacatcttccgtttcacgcaagcaggttctgaagtatctgcccttcttggtcgtatgccatctgcggtaggttaccaaccaacacttgcaacagaaatgggtcaattacaagagcgtattacatctacaaataaaggatctatcacgt

SEQ ID NO: 1642 - DNA, 829 bp, Bacillus mycoides NRRL BD-15
gatggcggaaagctaccagaaatctacaacgcccttacggtaaaacaaagcaacgaaaacggagcaaacattaacttaacatttgaagttgcacttcatttaggtgatgatacagttcgtacagttgcgatgtcttccacagatggacttgttcgtggcacagaagtagaagatactggtaaagcaatctctgtaccagttggtgatgtaacacttggtcgtgtattcaacgtattaggtgatgcaattgacttagatggtgaagttcctgcggatgtacgtcgtgatccaattcaccgtcaagcacctgcattcgaagaattatctactaaagtagaaattcttgaaactggtattaaagtagtagacttacttgctccttacattaagggtggtaagattggtctattcggtggtgccggtgtaggtaaaacagtattaattcaggaattaattaacaacatcgcacaagaacacggtggtatctctgtattcgccggtgtaggtgagcgtactcgtgaaggtaacgacttataccacgaaatgagcgattctggcgtaattaagaaaactgcgatggtattcggacaaatgaacgagccacctggagcacgtcaacgtgttgcattaacaggtttaacaatggctgagcatttccgtgatgagcaaggacaagacgtactactgttcatcgataacatcttccgtttcacgcaagcaggttctgaagtatctgcccttcttggtcgtatgccatctgcggtaggttaccagccaacacttgcaacagaaatgggtcaattacaagagcgtattacatctacaaata

SEQ ID NO: 1643 - DNA, 823 bp, Bacillus pseudomycoides NRRL BD-10
aatctacaatgcccttacggtaaaacaaagcaacgaaaacggagcaagcattaacttaacatttgaagttgcacttcatttaggtgatgacacagttcgtacagttgcgatgtcttccacagatggacttgttcgtggcacagaagtagaagatactggtaaaccaatctctgtaccggttggtgatgcaacacttggtcgtgtatttaacgtattaggtgatgcaattgacttagatggtgaagttcctgcggatgtacgccgtgatccaattcaccgtcaagcacctgcgttcgaagagttatctacgaaagtagaaattcttgaaactggtattaaagtagtagacttacttgctccttacattaaaggtggtaaaatcggtctattcggtggtgccggtgtaggtaaaacagtattaatccaggaattaattaacaacatcgcacaagagcacggtggtatttctgtattcgctggtgtaggtgagcgtactcgtgaaggtaatgacttataccacgaaatgagcgattctggcgtaatcaagaaaacagcgatggtattcggacaaatgaacgagccacctggtgcacgtcaacgtgttgcattaacaggattaacaatggctgaacatttccgtgatgagcaaggacaagacgtactattgttcatcgataacatcttccgtttcacgcaagcgggttctgaagtatctgcccttcttggtcgtatgccatctgcggtaggttaccaaccaactcttgcaacagaaatgggtcaattacaagagcgtattacatctacaaataaaggatctatcacg

SEQ ID NO: 1644 - DNA, 708 bp, Bacillus pseudomycoides NRRL B-617
ggaaagctacctgaaatctacaatgcccttagaattaaacaagacgcagttaacttaactttagaagttgcacttcacttaggtgatgatacagttcgtacagttgcgatgtcttccacagacggacttgttcgtggtactgcagtagaagatactggcaaagcgatttctgttccagttggtgatgcaacacttggtcgtgtatttaacgtattaggtgatgcaattgacttagatggtgaggttccagcagatgtacgccgtgatccaattcaccgtcaagcacctgcattcgaagagttatctacaaaagtagaaattcttgaaactggtattaaagtagtagacttacttgctccttacattaaaggtggtaaaatcggtctattcggtggtgccggtgtaggtaaaacagtattaattcaggaattaattaacaacatcgcacaagagcacggtggtatctctgtattcgctggtgtaggtgagcgtactcgtgaaggtaacgacttataccatgaaatgagcgattctggcgtaatcaagaaaactgcgatggtattcggacaaatgaacgagccacctggtgcacgtcaacgtgttgcattaacaggtttaacaatggctgaacatttccgtgatgagcaaggacaagacgtactattgttcatcgataacatcttccgtttcacgcaagcgggttctgaa

SEQ ID NO: 1645 - DNA, 778 bp, Budvicia aquatica ATCC 35567
gtacgatgcgcttgaagttcaaaacgatgtcaaactagtgctggaagttcaacagcagctcggtggtggtgtcgttcgttgtatcgctatgggtacctcagatggcctaagccgcggtctgaaagtacttgatttagaacaccctatcgaagttcctgtcggtgtggcaactctgggccgtattatgaacgtgcttggtgagcctatcgatatgaagggtgacattggtgaagaagagcgttgggctatccatcgcgctgcaccaagctacgaagatttatccagtgctaacgaactgctggaaacgggcatcaaggttatcgacctgatttgtccgtttgccaaaggcggtaaagttggtctgtttggtggtgccggcgtaggtaaaacggtaaacatgatggagctgattcgtaatattgcgactgagcactcaggttactctgtatttgccggcgttggtgagcgtactcgtgagggtaatgacttctaccacgaaatgacagaatctaacgtattagacaaagtatctctggtttatggccaaatgaatgagccaccgggaaaccgtctgcgcgttgcgttaaccggcctgaccatggcggaaaaattccgtgatgaaggccgtgacgttctgctgtttatcgataacatttatcgttataccttagccggtacagaagtatcagcactgttaggtcgtatgccatcagcggtaggttaccaaccaacgctggcggaagagatgggtacactgcaagaacgtatcacytcaacc

SEQ ID NO: 1646 - DNA, 806 bp, Buttiauxella agrestis ATCC 33320
gatgccgtaccaaaagtgtacgacgctcttgaggttacaaatggtaaagaccgtctggtgctggaagttcagcaacagttaggtggtggcgtagtgcgtactatcgccatgggtacttctgatggtttgcgtcgtggtctggaagtttctaacctcgatcacccaattgaagtgccagtaggtaaagcaactctgggccgtatcatgaacgtcctgggcgagcctatcgacatgaaaggcgatatcggcgaagaagagcgttgggcgattcaccgtgctgctcctagctacgaagaactgtctagctcccaggatctgctggaaaccggcatcaaagtaatggacctgatttgcccgttcgctaagggtggtaaagtcggtctgttcggtggtgcgggtgtgggtaaaactgtaaacatgatggagctgatccgtaacatcgcgatcgagcactccggttactcagtgtttgcaggcgtgggggaacgtactcgtgagggtaacgacttctaccatgaaatgaccgattccaacgttctggacaaagtatcactggtttatggccagatgaacgagccaccaggtaaccgtctgcgcgttgcgttgaccggtctgaccatggctgagaagttccgtgacgaaggtcgtgacgttctgctgttcgttgataacatttaccgttataccctggccggtacagaagtatctgcgctgctgggtcgtatgccatctgcggtaggttaccagccaactctggcagaagagatgggtgttttgcaggagcgtattacctccaccaaaactgg

SEQ ID NO: 1647 - DNA, 1122 bp, Candida norvegica ATCC 36586
gaaaccgttgttgacactggttccccaatcaccgtcccagttggtcgtgaaaccttgggtcgtatcattaacgttatcggtgaaccaatcgatgaacgtggtccaatcaacaccaagcaaagaaacccaatccatgctgatcctccttcatttgctgaacaatccacttctgctgaagttttagaaaccggtattaaagttgtcgatttattggctccttatgccagaggtggtaaaattggtttattcggtggtgccggtgtcggtaaaaccgtctttatccaagaattgattaacaacattgctaaagctcatggtggtttctcagtcttcaccggtgtcggtgaaagaaccagagaaggtaacgatttataccgtgaaatgaaagaaaccggtgtcattaacttggaaggtgactctaaagtcgctttagtcttcggtcaaatgaacgaacctccaggtgctagagcccgtgttgccttaaccggtctaaccattgctgaatacttcagagatgaagaaggtcaagatgtcttgttattcgttgataacattttcagattcacccaagctggttcagaagtctctgccttattaggtcgtattccatctgctgtcggttatcaaccaaccttggccactgatatgggtttgttgcaagaacgtatcaccaccaccagaaaaggttccgtcacttctgtccaagctgtttatgtcccagctgatgatttgactgatcctgccccagccaccactttcgcgcatttggatgctactactgtcttgtctcgtggtatctcagaattgggtatctacccagctgtcgatccattggattccaaatcaagattattagatgccgctgttgttggtcaagaacattacgatgttgctactcaagttcaacaaactttacaagcctacaaatctttacaagatattatcgctattttaggtatggatgaattatcagaacaagataaattgaccgttgaaagagctagaaagatccaacgtttcttatctcaaccatttgctgtcgctgaagttttcactggtattccaggtagattagttagattgaaagaaaccgttgcttcattcagagacgttttagctggt

SEQ ID NO: 1648 - DNA, 813 bp, Streptococcus pneumoniae ATCC 700677
tacgtctcttaccctgacgatgatttgcaagtcgcatctacggtcgtagatgtttcaaatggtaaagtcatcgcccaacttggagctcgtcaccaagcaagtaacgtttcatttggtaccaaccaagctgtggaaaccaatcgtgactggggatcaactatgaaaccaatcacagactatgctcctgccttggagtacggtgtctacgattcaactgctactatcgttcacgatgagccctataactaccctgggacagatatccctctctataactgggatcgagcatatttcggtaatattactctgcaatatgcccttcaacaatctcgtaacgtacctgccgttgaaacactaaacaaggtcggtctagataaggctaaaaccttccttaatggtcttggtatcgactatccaagcatgcattatgcaaacgccatttcaagtaatacaactgaatccaacaaaaaatatggtgcaagtagtgaaaaaatagctaccgcctatgccgcattcgcaaatggtggtatttaccacaaaccaatgtacatcaataaagttgtctttagcgatggtagcgaaaaagaattttctgaccctggcacaagagccatgaaagaaacgactgcttacatgatgacagaaatgatgaaaacagtctggacgtacggaactggtcgtggtgcctacctgccttggcttcctcaagctggtaaaacaggtacctctaactatactgacgaagaaattgaaaagtatatcaagaacactggttacgtagctccagatgaaatgtttgtgggttatacccgt

SEQ ID NO: 1649 - DNA, 813 bp, Campylobacter lari ATCC 43675
attaatgaagctattgttgttaattatgaattagaaggaaaagaatgcaagctagttcttgaagtagctgcacatttaggcgataataaagtaagaaccatcgctatggatatgacagatggtcttgttagaggtttaacagccgtcgcaactggaaatccaattagtgttccagtaggcgaaaaagttcttggaagaatttttaatgtaacgggtgatttgattgatgagggcgaagaaatcaattttgataagcactggtcaattcatagagatccacctccatttgaagaacaaagtacaaaaagcgaaatctttgaaacaggtataaaggttgttgatttgctagctccttatgctaaaggtggaaaagttggtctttttggtggtgcaggtgttggtaaaaccgttattattatggaattaattcacaatgttgcatttaaacatagcggatattctgtttttgcaggtgttggcgaaagaactcgtgagggtaatgacctttacaatgaaatgaaagaaagtaatgtattagataaagttgcattgtgttatggtcaaatgaatgaaccaccaggggcaagaaatcgtatagctttaacaggtcttactatggctgagtattttagagatgaaatgggacttgatgttttaatgattattgataatattttcagattttctcaatcaggctcagaaatgtcagcacttttaggaagaattccttcagctgttggttatcaaccaaccttagctagtgaaatgggtaagttccaagaaagaattacttcaaccaagaaaggatctatt

SEQ ID NO: 1650 - DNA, 570 bp, Coccidioides immitis strain WSA-222
ggtggggaagactgtgttcattcaggaattgattgtaagttctgttatcaactaaagccgacagcggttgctgatatgctctagaacaacattgctaaggctcacggtggttactccgtgttcactggtgtcggtgagcgtacccgtgagggtaacgatttgtaccatgaaatgcaagagacccgtgtcattcaactcgacggagagtccaaggtcgctcttgtcttcggtcaaatgaacgagccccctggtgcccgtgcccgtgttgcccttaccggtttgaccattgctgaatacttccgtgacgaggaaggccaagacggtaggcttcatgcttctatcgctaggggcgtgtgatacaggaggctaatcgcttttctagtgcttctctttattgacaacattttccgtttcactcaagctggttctgaagtgtctgccttgctcggtcgtattccttccgctgtcggttaccaacctactctcgccgtcgacatgggtgttatgcaggaacgtatcaccaccaccaccaagggatccattacttcagtgcargccgtctacgtcccc

SEQ ID NO: 1651 - DNA, 560 bp, Emmonsia parva ATCC 10784
tgtcttcatccaggagttaattgtacgttttttgtctgcctactataatagacgaagaaatattttgatttatttttctaataattcaaatagaacaacattgccaaagcccacggtggttactctgtcttcactggtgttggcgagcggacccgtgaaggaaacgatctgtaccacgaaatgcaggagacccgtgtcatccagctcgatggcgagtccaaggtcgccctcgtcttcggtcaaatgaacgaaccccccggagcccgtgcccgtgttgccctcactggtctgaccgttgctgaatacttccgtgacgaggaaggtcaagatggtgcgtatatatatattcgccagtaatttgactcgaagctccactcacacatatattagtgctcctcttcatcgacaacattttccgcttcacccaggcaggttccgaagtgtccgccctgctcggccgtatcccctccgccgtcggttaccagcccaccctcgctgtcgacatgggtatgatgcaggaacgtatcaccaccaccaccaagggctccatcacctccgtg

SEQ ID NO: 1652 - DNA, 780 bp, Erwinia amylovora ATCC 14976
ccacaagtgtacagcgcccttgaggttaaaaatggtgatgctcgtctggtgctggaagttcagcagcagctgggcggtggcgtggttcgtaccatcgccatgggttcttcagacggccttaagcgtggtctggaagccgttgaccttcagcacccaattgaagtaccggtaggtactgccacacttggccgtatcatgaacgtgctgggtgagccgatcgatatgaaaggcgacattggcgaagaagagcgctgggcgattcaccgctctgcaccttcttacgaagatcagtcgaactctcaggatctgctggaaaccggcatcaaggtgattgacctgatgtgtccgttcgccaagggcggtaaagtcggcttgttcggtggtgcgggcgtaggtaaaaccgtcaacatgatggagcttattcgtaacattgcggctgagcactcaggtttctcggtatttgccggtgtgggtgagcgtacccgtgaaggtaacgacttctaccacgaaatgaccgactccaacgttatcgacaaagtttcgctggtctatggtcagatgaacgagccaccgggtaaccgtctgcgcgttgcgctgaccggtctgaccatggcggagaagttccgtgacgaaggtcgtgacgtactgctgtttatcgataacatctatcgttacaccctggccggtactgaagtctccgctctgctgggtcgtatgccttctgcggtaggttaccagccaacgctggcggaagagatgggcgttctgcaggaacgtatc

SEQ ID NO: 1653 - DNA, 545 bp, Fonsecaea pedrosoi ATCC 18831
tgtgttcattcaggagctgattgtgagtaccccggagattttcctgcgattgcgcatgaagcaagcgctgacgtccatctagaacaacatcgccaaggctcacggtggttactccgtgttctgcggtgtcggcgagcgtactcgtgagggtaacgatttgtaccacgaaatgcaggagaccggtgtcatcaacctcgagggcgagtccaaggtcgcccttgtcttcggtcagatgaacgagcccccgggagcccgtgcccgtgtcgcccttactggtcttaccgtcgctgagtaagttttgacaaccagaagcgagtattgccacaattactgactaaaaatcaagatatttccgtgacgaggagggccaggatgtgcttctcttcattgacaacattttccgtttcacccaggccggttctgaggtgtccgctcttctcggccgtattccctctgccgtcggttaccagcccactctcgccgtcgacatgggtatgatgcaggagcgtatcaccaccacccagaagggttccatcacttccgtc

SEQ ID NO: 1654 - DNA, 564 bp, Fusarium moniliforme strain WSA-213
tgtgtttattcaggagctcatcaacaacatcgccaaggcccacggtggttactctgtcttcactggtgtcggtgagcgaacccgtgagggtaacgatctgtaccacgaaatgcaggagacttccgttattcagcttgatggcgagtccaaggttgccctggttttcggtcagatgaacgagccccctggagctcgtgcccgtgtcgctcttaccgggtaagttgatagatagtgccttcccttcctgtttcaacacctcaacaccaccactccccaagacattgctactcatactgcaccatgatattatatttacgcctcttggacgctagctaatgttgtatcgacagtttgactgttgctgagtacttcagagacgaggagggtcaggacgtgctgcttttcattgacaacattttccgattcactcaggccggttccgaggtgtctgcccttctcggtcgtatcccctctgccgtcggttaccagcccactctggccgtcgacatgggtggtatgcaggagcgtattaccaccaccaccaagggttccattacctcagtc

SEQ ID NO: 1655 - DNA, 776 bp, Klebsiella oxytoca ATCC 13182
cgtaccgcgcgtgtacgaggctcttgaggtacaaaatggtagtgagaatctggtgctggaagttcagcagcagctcggcggcggtattgttcgtaccatcgccatgggttcttccgacggtctgcgtcgcggtctggaagtcaaagacctcgagcatccgatcgaagtcccggtaggtaaagcaacgctgggtcgtatcatgaacgtactgggccaaccggtagacatgaaaggcgacatcggcgaagaagagcgttgggcgattcaccgcgcagcgccttcctacgaagagttgtcaaactctcaggaactgctggaaaccggcatcaaagttatcgacctgatgtgtccgtttgcgaagggcggtaaagttggtctgttcggtggtgcgggtgtaggtaaaaccgtaaacatgatggagctgatccgtaacatcgcgatcgagcactccggttactccgtgtttgcgggcgtaggtgaacgtactcgtgagggtaacgacttctaccacgaaatgaccgactccaacgttatcgataaagtatccctggtgtatggccagatgaacgagccgccgggaaaccgtctgcgcgttgcgctgaccggcctgaccatggctgagaagttccgtgacgaaggtcgtgacgttctgctgttcgtcgataacatctatcgttacaccctggccggtactgaagtatccgcactgctgggtcgtatgccttcagcggtaggttaccagccgactctggcggaagagatgggcgttctgcagg

SEQ ID NO: 1656 - DNA, 572 bp, Microsporum audouinii ATCC 11347
gtgttcatccaggagttgattgtaagtgattatattcccctagaaagaaatgttttgaacaaaagtctcgaattagaaaattcttttcagatactaatttactatagaacaacattgccaaggctcacggtggttactccgtcttcaccggtgtcggagagcgaacccgtgaaggaaacgatctgtaccatgaaatgcaggaaactcgtgtcatccaacttgatggcgagtccaaggtcgccctggtcttcggtcagatgaacgagcccccaggtgcccgtgcccgtgttgctcttactggtttgaccattgctgagtacttccgtgatgaggaaggtcaagacggtatgttctttaaattagatatcttctggagaaacagcgtctaacaaattcttccagtgcttctcttcatcgacaacatcttccgtttcactcaggctggttccgaagtgtctgccctgcttggtcgtattccatctgccgtcggttaccaacccactcttgccgtcgacatgggtggtatgcaggaacgtattaccaccaccaagaagggatccattacctccgtc

SEQ ID NO: 1657 - DNA, 790 bp, Obesumbacterium proteus ATCC 12841
gcctaaagtgtataacgcacttgaggtgaaaggcggtgccactaaactggtactggaagttcagcagcagctaggcggcggcgttgtacgctgtatcgctatgggtacttctgacggtctgcgtcgcggactggacgttgttgacctggagcacccgattgaagtcccagtaggtaaagcgaccttaggccgcattatgaacgtactgggtgagccaattgatatgaagggtgatatcggcgaagaagatcgctgggctattcaccgtgaagctccaagctacgaagaactgtctaactcgcaagaactgctggaaaccggtatcaaggtaatggacttgatttgtccgttcgctaagggcggtaaagtcggtctgttcggtggtgcgggtgttggtaaaacagtaaacatgatggagctgatccgtaacatcgcgatcgagcactcaggttactctgtatttgccggcgtgggtgaacgtactcgtgagggtaacgacttctaccacgaaatgaccgactccaacgtattggacaaagtatcactggtttatggccagatgaacgagccaccaggaaaccgtctgcgcgttgcgctgaccggtctgactatggctgagaagttccgtgacgaaggtcgtgacgtactgctgttcatcgataacatctaccgttataccttggccggtaccgaagtatctgcactgctgggtcgtatgccttctgcggtaggttatcagccaacgctggcggaagagatgggtgttctgcaagaacgtatcacctctacc

SEQ ID NO: 1658 - DNA, 622 bp, Paracoccidioides brasiliensis ATCC 200443
tgtcttcattcaggagcttatcaacaacatcgccaaggcccacggtggttactccgtcttcactggtgtgggagagcgcactcgtgagggaaacgacttgtatcacgagatgcaagagacttccgttatccagctcgaaggcgaatccaaggttgccctcgtcttcggtcaaatgaacgagcctccgggtgctcgtgctcgtgttgctctcaccggtcgtaagtgctccttcccagatttctcttccccagtttctggacccactttttccttccaccaccattctactgggtaggaccaagatagcactgcctattctggtgccttcctaccgcctactctactgcctattccaccaccttttctaccgcctcttctacttgctattgtatactaacttactcaaacagttactattgctgagtacttccgtgacgctgagggccaggatgtgcttctcttcatcgacaacattttccgtttcacccaggccggttccgaggtgtccgctcttctcggtcgtatcccctccgccgtcggttaccagcccacccttgccgtcgacatgggtggtatgcaggagcgtatcaccaccaccaagaagggatccattacctccgtc

SEQ ID NO: 1659 - DNA, 794 bp, Plesiomonas shigelloides ATCC 14029
gacgctgtacctcaggtgtacgatgcactgacagttgagggtgctgagctggtactggaagtgcagcagcagctgggtggtggtgttgttcgctgtatcgcgatgggtgcctctgatggcctcaagcgcggtctgaaagcgcacaatactggtgctcctatcactgtaccggtgggtgtggaaacactgggccggatcatggatgtgttgggtaacccgattgaccagaaaggtccaatcggtgaacaagatcgctgggtgatccaccgtgaagcaccaagctacgaagatcaggctaacagcactgaactgctggaaaccggtatcaaggttatcgacctggtatgcccgtttgcgaaaggcggtaaagtcggtctgttcggtggtgccggtgtaggtaaaaccgtaaacatgatggagctgatccgtaacatcgcgatcgagcactccggttattccgtgtttgcgggcgtgggtgagcgtacccgtgaaggtaacgacttctaccacgaaatgacagactccaacgtactggacaaagtatccctggtgtacggtcagatgaacgagccgccaggtaaccgtctgcgcgtagcactgaccggcctgaccattgcggagaaattccgtgatgaaggtcgtgacgtactgctgttcatcgataacatctaccgttataccctggcggggaccgaagtatcggcactgctgggccgtatgccttctgcggtaggttatcagccaacgctggcggaagagatgggtgtactgcaagagcgtattacctctacccg

SEQ ID NO: 1660 - DNA, 799 bp, Shewanella putrefaciens ATCC 8071
aggtatatgacgctstgaagatcacaggtgaaggcgcctgtaatggtttggtgctggaagttcagcaacagctaggcggtggtgtagttcgtactatcgctatgggttcttctgatggtctgcgtcgtggtcttgaggttgttaactcaggttcacctatttctgttcctgttggtaccgccacgcttggccgtatcatgaacgtattaggtgagcctattgatgaagcgggtccaatcggtgaagaagagcgttatgttattcaccgtgcagcaccttcatatgaagatcaatcgaacactactgaactgttagagacaggtatcaaggttattgaccttgtttgtccattcgctaagggtggtaaagtaggtctgttcggtggtgcgggtgttggtaaaacagttaacatgatggaactgattaacaacatcgctaaagctcactcgggtctttcggtgttcgccggtgtgggtgaacgtactcgtgaaggtaacgacttctactacgagatgaaagattctggcgttctcgacaaagtggccatggtttatggtcagatgaacgagccaccaggaaaccgtttacgcgtagcactgtcaggtctgacaatggctgagaagttccgtgacgaaggtcgtgacgtattgttgttcgttgacaacatctaccgttataccttagccggtactgaagtatctgcactgttaggccgtatgccttctgcggtaggttatcaaccaacattggctgaagaaatgggcgttctgcaagagcgtattacttcaactaagacggg

SEQ ID NO: 1661 - DNA, 18 bp, Artificial Sequence
  Synthetic DNA Sequence
tgggaagcgaaaatcctg

SEQ ID NO: 1662 - DNA, 774 bp, Campylobacter curvus ATCC 35224
ctatgcctcaaactagagagcatatcttgctatctcgccaagtaggcgttccatatatcgttgtatttatgaacaaagccgatatggtcgatgacgctgagcttcttgagctagtcgagatggaaattcgcgagcttcttaacgagtacaacttccctggcgatgatactcctatcatatcaggttctgctcttaaagccctcgaagaggctaaagcaggcgttgatggcgagtggtcagcaaaagttcttgagcttatggataaagtcgatgagtatatcccaactccagttcgtgctaccgataaagacttcctgatgcctatcgaagacgttttctctatctcaggtcgtggaacggtcgttactggtaggatcgaaaaaggtgtcgtaaaagttggcgatactatcgagatcgttggtatcaaacctactcaaactacgacagttactggcgttgagatgtttaggaaagagatggaacaaggcgaggccggtgataacgtaggtgttcttttaagaggtactaaaaaagaagacgtcgagcgcggcatggttctttgtaagccaaaatcaatcactcctcatacaaaatttgagggtgaggtttatatcctaacaaaagaggaaggcggacgccacactccattctttaacaactatagaccacaattttatgtaagaacaacagacgttacaggttctatcacacttccagaaggaactgagatggttatgcctggagataatgtcagaatttccgttgaactcatcg

SEQ ID NO: 1663 - DNA, 791 bp, Campylobacter rectus ATCC 33238
ttctgcggctgacggcccaatgccacaaactagagagcacatcttgctatctcgccaagtaggcgttccgtatatcgttgtttttatgaacaaagccgatatggtcgatgatgccgagcttcttgagctggttgagatggagattcgcgagcttctaaacgagtatgatttccctggtgacgatactccaatcgtagcaggctctgctcttcaagctcttaatgaagccaaagccggaacagaaggcgagtggtctgcaaaaattcttgagcttatggctaaagttgacgagtatatcccgactccggttcgtgcaacggataaagacttcttgatgcctattgaggacgttttctctatctccggtcgcggcaccgtcgttaccggcagaatcgaaaaaggtatcgtaaaagtcggtgatactatcgagatcgtaggtatccgcgatactcaaacaactaccgttaccggcgttgagatgttcagaaaagagatggatcaaggcgaagcgggcgataacgtaggcgttcttctaagaggcactaaaaaagaagacgttgagcgcggtatggttctttgcaaacctaaatcaatcactcctcacactaaatttgagggagaggtttatatcttaactaaagaggaaggcggacgccatactccattctttaataactatagaccgcagttttatgtaagaactaccgacgttaccggttctatcactcttccggaaggaacagagatggttatgcctggcgataacttaaagataagcgttgagcttatcg

SEQ ID NO: 1664 - DNA, 810 bp, Fonsecaea pedrosoi ATCC 18831
cgacggacagatgccccagaccagggagcacttgctcctcgcccgccaggtcggtgtcaagcgcattgtcgtcttcgtcaacaaggtcgatgccattgaggacaaggagatgttggagctcgtcgagatggagatgcgtgagcttctctccagctacggcttcgagggtgacgacactcccatcgtcatgggttccgccctttgcgccattgagggccgcgagcccgacattggtgtcgagaagattgacgagctcctcgagcacgtcgacacctggatccccacccccgagcgtgacatcgccaagcctttcctcatgtccgttgaggacgtcttctccattcccggccgtggtaccgtcgcttctggccgtgtcgagcgtggtgtcctgaagaaggattccgaagtcgagcttgtcggcaagaacaagaaccccatcaagaccaaggttaccgacatcgagaccttcaagaagtcttgcgacgagtcccgcgctggtgacaactccggtctccttctccgtggtgtcaagcgtgacgatgtcctccgtggcatggtcgttgtccagcccggcaccaccaaggcccacaagaagttccttgcctccatgtacgtcctcaccaaggaggagggtggccgccacactggtttcgccaacaactacaagccccagatgttcatccgtaccgccgatgaggccgccactcttacctggcccgagggtaccgaggaggacaagatggtcatgcccggtgacaatgtcgagatgatctgcgagatccacaagcccattgccgtcgagcaaggcca

SEQ ID NO: 1665 - DNA, 19 bp, Artificial Sequence
  Synthetic DNA Sequence
cagtacaggtagacttctg

SEQ ID NO: 1666 - DNA, 888 bp, Microsporum audouinii ATCC 11347
atgattgcgaaacctacttgctgtggaagaatttggatattctaacatttctctaggcctcaaaccagagagcatctgctccttgcccgccaggtcggtgttcagaagctcgtcgttttcgttaacaaggtcgacgctgttgaggacccagagatgttggaacttgtcgagctagagatgcgtgagctgctcagccactatggtttcgagggtgaggagaccccaatcatttttggctctgctctctgcgcccttgaatctcgacgaccagaattgggtgttgagaagatcgatgagctattgaacgctgtggatacctggattcccaccccagagcgtgccactgataagcctttccttatgtccattgaggaagttttctccatctctggtcgtggtaccgtcgtttccggtcgtgtcgagcgtggtatcctcaagaaggactctgatgtcgaaattgtgggtggatctgatacacccatcaagacgaaggtcaccgacattgaaaccttcaagaagtcttgtgacgaatcccgagctggtgacaactccggtctacttctccgaggtgtcaagcgtgaggacttgagacgtggaatggttgttgctgctcccggatcgaccaaggctcataccgacttcatggtctccctttatgttctgaccgaggctgagggtggccgttccaatggattcacccacaagtaccgcccacagatgttcatccgtactgccggtatgtaaaccctttttctaccattcactttgtttcaccactgacttgtatactttaccgcagacgaagccgcatctttcagctggcctggagaggatcaagacaagaaggccatgcctggtgacaatgtcgagatgatttgcaagaccctc

SEQ ID NO: 1667 - DNA, 793 bp, Piedraia hortai ATCC 24292
atgccgcagacccgcgagcacttgctgctcgcccgtcaggtcggtgtccagaagatcgttgttttcgtcaacaaggttgatgctatcgacgacccggagatgctggagcttgtcgagatggagatgcgtgaacttctcagcacatacggtttcgagggtgacgagacccctgttattatgggctccgcgctcatggctctcaacaaccagcgccccgagattggtcaacagaagattgatgaactcatggccgctgtcgacgagtggatccctactccccagcgtgacctcgacaagcctttcctgatgtctgttgaggatgtcttctccattgctggccgtggtaccgttgtgtccggccgtgtggagcgcggtaccctcaagcgtgatgaggaagtcgagcttgtcggcaagggtgtcgaccccatcaagaccaaggtcaccgatatcgagactttcaagaagtcctgcgaggaggctcaggctggtgacaactctggtcttctgatccgtggtgtccgccgcgaggatgttcgtcgcggtatggttgtctccaagcccggcaccgtcaagtctcacactcagttcctggcctcgctttacgttctcaccaaggaggagggtggtcgccacactggtttcggcgagcactaccgtccccagctctacctccgtacctcagacgagtctgtcgatctgaccttccccgagggaactgaggatcaccactccaagatcgtcatgcctggtgacaacatcgagatggtcgtcacgatgactcacgccaacgcta

SEQ ID NO: 1668 - DNA, 891 bp, Escherichia coli strain K-12 KL1699
aacatgatcaccggtgctgcgcagatggacggcgcgatcctggtagttgctgcgactgacggcccgatgccgcagactcgtgagcacatcctgctgggtcgtcaggtaggcgttccgtacatcatcgtgttcctgaacaaatgcgacatggttgatgacgaagagctgctggaactggttgaaatggaagttcgtgaacttctgtctcagtacgacttcccgggcgacgacactccgatcgttcgtggttctgctctgaaagcgctggaaggcgacgcagagtgggaagcgaaaatcctggaactggctggcttcctggattcttacattccggaaccagagcgtgcgattgacaagccgttcctgctgccgatcgaagacgtattctccatctccggtcgtggtaccgttgttaccggtcgtgtagaacgcggtatcatcaaagttggtgaagaagttgaaatcgttggtatcaaagagactcagaagtctacctgtactggcgttgaaatgttccgcaaactgctggacgaaggccgtgctggtgagaacgtaggtgttctgctgcgtggtatcaaacgtgaagaaatcgaacgtggtcaggtactggctaagccgggcaccatcaagccgcacaccaagttcgaatctgaagtgtacattctgtccaaagatgaaggcggccgtcatactccgttcttcaaaggctaccgtccgcagttctacttccgtactactgacgtgactggtaccatcgaactgccggaaggcgtagagatggtaatgccgggcgacaacatcaaaatggttgttaccctgatccacccgatcgcgatggacgacggtctgcgtttcgcaatccgtgaaggcggccgtaccgttggcgcgggc

SEQ ID NO: 1669 - DNA, 805 bp, Saksenaea vasiformis ATCC 60625
tcctcgtggtcgccgccaccgacggcccgatgccgcagaccaaggagcacgtgctcctggcccgccaggtcggcgttccgtacatcgtcgtcgccctcaacaaggccgacatggtggacgacgaggagatcctggagctcgtcgagctcgaggtccgtgagctcctctccgagtacgagttcccgggcgacgacgttcccgtcgtcaaggtctccgctctgaaggccctcgagggcgacaaggagtggggcaactcggttctcgagctcatgaacgccgtcgacacggcgatccccgagcccgagcgtgacgtcgacaagccgttcctcatgccgatcgaggacgtcttcacgatcaccggtcgcggtacggtcgtcaccggccgtatcgagcgtggtgtcctgaaggtcaacgagaccgtcgacatcatcggcatcaagaccgagaagaccaccaccacggtcaccggcatcgagatgttccggaagctcctcgacgagggccaggccggtgagaacgtcggtctgctcctccgtggcatcaagcgcgaggacgtcgagcgcggccaggtcatcatcaagccgggctcggtcacgccgcacacggagttcgaggcgcaggcctacatcctgtccaaggacgagggtggccgccacacgccgttcttcaacaactaccgcccgcagttctacttccgtacgacggacgtgaccggcgtggtgaccctccccgagggcaccgagatggtcatgccgggtgacaacaccgagatgaaggtggagctcatccagcccgtcgccatgga

SEQ ID NO: 1670 - DNA, 935 bp, Trichophyton tonsurans ATCC 56185
gcttctgacggtcaaatgtaattgaatgcccgcccagacagatgaaaggatttgacgtttctaacatcagtctaggcctcagaccagagaacatttgctccttgcccgccaggtcggtgtccagaagctggtcgttttcgttaacaaggtcgatgccgttgaggacccagagatgttggagcttgtcgaacttgaaatgcgtgaactcctcagccactacggtttcgagggtgaggagacccccatcatttttggctctgctctctgtgccctcgagtcccgtcgacctgagcttggtgtcgagaagattgacgagctattgaacgccgtcgacacctggatccccaccccagagcgcgccactgataagcctttcctcatgtccattgaggaagtgttctctatctctggtcgtggtaccgtcgtctccggtcgtgttgagcgtggtatcctcaagaaggattcggacgtcgaaattgttggtggctctaccacccctatcaagaccaaggtcaccgatatcgaaaccttcaagaagtcctgcgatgaatctcgagctggtgacaactctggtctccttctccgaggtatcaagcgtgaggacttgaagcgtggaatggttgttgctgcccccggatccaccaaggctcacaccgacttcatggtctccctctacgtcctgactgaggctgagggtggtcgttccaacggcttcacccacaagtaccgcccccaaatgttcatccgtactgctggtatgtaacccaagtttccgctatttactaagtagatcattgctaacttgtatttccttccgtagacgaagccgcatctttcagctggcctggagaagaccaagacaagaaggctatgcctggtgacaacgtcgagatgatttgcaagaccctccaccccattgctgccgaggctggcca

SEQ ID NO: 1671 - DNA, 772 bp, Enterobacter aerogenes ATCC 13048
acgatgcccttgaggtacagaatggtaatgagagcctggtgctggaagttcagcagcagctcggcggtggcgtagtccgtgctatcgccatgggttcttccgacggtctgcgtcgtggtctggaagttaaagaccttgagcacccgatcgaagtcccggtaggtaaagcgactctgggccgtatcatgaacgtcctgggtcagccgatcgacatgaaaggcgacatcggcgaagaagaacgttgggctatccaccgcgcggcgccttcctatgaagagctgtccagctctcaggaactgctggaaaccggcatcaaagttatcgacttgatgtgtccgttcgctaagggcggtaaagttggtctgttcggtggtgcgggtgtaggtaaaaccgtaaacatgatggagctgatccgtaacatcgcgatcgagcactccggttactccgtgtttgcgggcgttggtgagcgtactcgtgagggtaacgacttctatcacgaaatgaccgactccaacgttctggataaagtatccctggtttacggccagatgaacgagccgccgggaaaccgtctgcgcgttgcgctgaccggcctgaccatggctgagaaattccgtgacgaaggtcgtgacgttctgctgttcgtcgataacatctatcgttacaccctggccggtactgaagtatctgcactgctgggccgtatgccttcagcggtaggttatcagccgactctggcggaagagatgggcgttctgcaggaacgtatcac

SEQ ID NO: 1672 - DNA, 1401 bp, Bordetella pertussis strain Tohama 1
atgagcaacggaaccatcgttcagtgcatcggcgccgtggtggatattcagttcccccgcgataacatgcccaagatctacgaagcgctcaccctggtcgacgagggttcctcgttcgccgagaagggcttgacgctggaagtgcaacaacagctgggcgacggcgtggtgcgtaccatcgcgctgggttccagcgacgggctgcgccgcggcatgcaagtggccggcaccggcgcaccgatctcggtgcccgtgggccacggcaccctgggccgcatcatggacgtgctgggccgtcccatcgacgaagccggtcccatcgcctccgacgagaagcgcgccatccaccagcccgcgccccgtttcgacgagctgtcgccgtcggtcgagctgctggaaaccggcatcaaggttatcgacctggtgtgcccgttcgccaagggcggcaaggtcggcctgttcggcggcgccggcgtgggcaagaccgtcaacatgatggaactgatcaacaacatcgccaagcagcacagcggcttgtcggtgttcgccggcgtgggcgagcgtacccgcgaaggcaacgacttctaccacgaaatggaagagtcgaacgttctggacaaggtggccatggtgttcggccagatgaacgagcccccgggcaaccgcctgcgcgtggcgctgaccggcctgaccatggccgagaagttccgcgacgaaggccgtgacatcctgttcttcgtcgacaacatctaccgctacaccctggccggtaccgaagtgtcggcgctgctgggccgtatgccgtcggcggtgggctaccagcctacgctggccgaggaaatgggcgtgctgcaagagcgcatcacctcgaccaagaccggttcgatcacctcgatccaggccgtgtacgtgcctgccgacgacttgaccgacccgtcgcccgccacgaccttccagcacttggactcgaccgtcgtgctgtcgcgtgacatcgctgcgctgggcatctatcccgccgtggacccgctggattcctccagccgccagctcgacccgcaagtcgtgggcgaagagcactaccaggtggcccgtggcgtgcagcagacgctgcagcgctacaaggaactgcgcgacatcatcgcgattctgggcatggacgaactgtcgccggaagacaagcaggccgtggcccgcgcgcgcaagatccagcgcttcctgtcgcagcccttctacgtggccgaagtgttcaccggctcgccgggcaagtacgtgtcgctggccgaaacgatccgtggcttcaagatgatcgtcgacggcgagtgcgacgcgctgcccgagcaggcgttctacatggtcggcacgatcgacgaggccttcgagaaggccaagaaactccaataa

SEQ ID NO: 1673 - DNA, 797 bp, Arcanobacterium haemolyticum ATCC 9345
cagctaccgacggtccaatggctcagacccgcgagcacgttcttcttgctcgccaggttggcgttccacagatcatcgttgctctcaacaaggctgacatggttgacgacgaggaaatcctcgaactcgtcgaaatggaagttcgtgagcttctctcttcccaggagtacccaggtgacgacctcccagtcgtcaagatctcggcactcaaggctctcgaaggcgatgccgaatggagcaaggcaatcgaagatctcatggaagctgtcgatacctacttcgacgatccagtgcgtgacctcgataagccattcctcatgccaatcgaagacgtcttcaccatcaccggtcgtggcaccgttgttaccggccgtgcagagcgcggtatgctcaacttgaacgaagaagttgaaatcctcggtatccgtgcaccacagaagacaaccgttaccggtatcgaaatgttccacaagtcgatggatcacgcagatgcaggcgaaaactgtggtcttctcctccgtggcaccaagcgcgaagatgttgaacgtggtcaggttgttgccaagccaggcaccatcaccccacacaccaacttcgaagctcaggtctacgtgctcggtaaggaagaaggtggccgtcacaacccattcttctccaactaccgtccacagttctacttccgtaccacggatgttaccggcgtgatcacccttccagagggcaccgaaatggttatgccaggcgacaacaccgacatgacagttgagctcatccagccaatcgctatggaagagggc

SEQ ID NO: 1674 - DNA, 785 bp, Butyrivibrio fibrisolvens ATCC 19171
ctgatggtcctatgccacagacccgtgagcacatcctattagcacgtcaggtaggcgtaccatacatcatcgtattcctaaacaagtgcgatatggttgacgacgaggaattattagagttagttgagatggacgtacgtgatctattaaatcagtaccagttcccaggcgacgacactccaatcatccgtggttcagcactaggtgcattaaacggcgaagagaagtggaaagaggcaatctatcagttagcagacactctagattcatacattccagagccaaagcgtgatatcgatgatccattcctattaccaatcgaagatatcttctcaatctcaggtcgtggtactgtagtaaccggccgtgtagagcgtggtattgtacacgtaggtgacgaagttgaaatcgttggtattcgtccaaccaccaagaccactgtaactggcgttgaaatgttccgtaagttactagacgaaggtcgtgcaggtgataacgttggtgttctactacgtggtaccaagcgtgatgaggttgagcgtggtcaggttctagctgctccaggcacaatcactccacacaccaagttcactggtcaggtttacgtactaagcaaggatgaaggtggtcgtcacactccattcttcaagggctaccgtccacagttcttcttccgtacaaccgatattaccggttctatcgatctgaaagagggcgtagagatggtaatgccaggtgataacaccgacatgaccgtaaccctaatccacccagtagctatggct

SEQ ID NO: 1675 - DNA, 835 bp, Campylobacter jejuni subsp. doylei ATCC 49349
tggggcgatcttggttgtttctgctgcagatggtcctatgccacaaactagagagcacattcttctttctcgtcaagtaggcgttccatatattgttgtttttatgaataaagcagatatggttgatgatgctgagcttttagagttagttgaaatggaaattagagaattattaagctcttatgatttcccaggcgatgatacacctattatttctggttctgctttaaaagctcttgaagaagctaaagctggacaagatggtgaatggtcagcaaaaattatggatcttatggctgcagttgatagttatattccaactccaactcgtgatactgaaaaagacttcttgatgccaattgaagacgttttctcaatttcaggtcgtggtactgttgttacaggtagaattgaaaaaggtgttgtaaaagtaggtgatactatcgaaatcgttggtattaaagacactcaaacaacaactgtaacaggtgttgaaatgttcagaaaagaaatggatcaaggcgaggcaggagataacgtaggtgttcttcttcgtggtactaaaaaagaagaagttattcgcggtatggttcttgctaaaccaaaatcaattactccacacactgacttcgaagctgaagtttatatcttaaataaagatgaaggtggtagacatactccattctttaacaactatagaccacagttttatgtaagaacaactgatgttacaggttcgattaaattagctgatggtgttgaaatggttatgccaggtgaaaatgtgagaattactgtaagcttgatcgctccagtagcacttgaagaaggaact

SEQ ID NO: 1676 - DNA, 812 bp, Campylobacter lari ATCC 43675
ttctgcagcagacggccctatgccacaaactagagagcatatcttactttctcgtcaagtaggtgtaccatatattgttgttttcatgaacaaagctgatatggttgatgatgcagaattattagaattagttgaaatggaaattagagaattactaagctcttatgatttcccaggagatgatactccaattatttcaggttcagcattacaagctcttgaagaagcaaaagctggtcaagatggtgaatggtctaaaaaaatcttagatcttatggctgcagttgatgattatattccaactccggctcgtgatacagataaagatttcttgatgccaatcgaagatgttttctcaatctcaggtcgtggaactgttgttaccggtagaattgaaaaaggtgttgtaaaagttggtgatactatagaaatcgttggtattagagacactcaaacaaccacagttactggtgttgaaatgtttagaaaagaaatggatcaaggtgaagctggtgataatgttggtgtattacttcgtggaactaaaaaagaagatgttgaacgtggtatggttcttgctaaaccaaaatcaatcactccacatactgattttgaagcagaagtttatatcttaaataaagatgaaggtggtcgtcatactccattctttaataattatagaccgcaattttatgtaagaacaactgatgttacaggtgctattaaacttgcagaaggcgttgagatggttatgccaggcgataatgatagaattactgtaagtcttattgctccagttgcacttgaggaag

SEQ ID NO: 1677 - DNA, 828 bp, Campylobacter sputorum subsp. sputorum ATCC 35980
gctattcttgtatgttcagctgcagatggtccaatgccacagactagagagcatattctactatcaagacaagttggtgttccatacatagttgttttcttaaataaagaagatatggttgatgatgctgagcttatagagttggttgaagttgaggttagagatttattaaatgaatatgatttccctggagatgatactccaatcgtaataggttctgctcttaaagctttagaagaagcaaaagctggaacagagggtgaatggtctgctaaaattatgaaacttatggatgctgttgatagctatatcccaactccaacaagagatacagataaagatttccttatgccaatcgaagatatcttctcaatttctggtcgtggtacagttgtaacaggtagaattgaaaaaggtgtagtaaaagttggcgagactattgagatagttggtattagacctactcaaacaacaacagttactggtgttgaaatgtttagaaaagagctagatcaaggtgaagctggagataatgttggtatcttgttaagaggtacaaaaaaagaagatgttgaaagaggtatggttttatgtaaaccaaaatcaatcactcctcacaagaaatttgaaggcgaagtttatattcttacaaaagatgaaggtggtagacatactcctttctttagtaactatagaccacaattttatgttagaacaacagatgtaacaggttctatatctcttcctgagggaacagagatggatatgcctggtgataatgtaaaacttacagttgaacttataaacccaattgctcttgagcaagga

SEQ ID NO: 1678 - DNA, 820 bp, Campylobacter upsaliensis ATCC 49815
cgattttggttgtttctgctgctgatggtcctatgccacaaactagagagcacattttgctttctcgtcaagtgggtgttccttatatcgtagtttttatgaataaggctgatatggttgatgatgcagagcttttagaattggttgaaatggaaattagagaacttttaagctcttatgatttcccgggcgatgacactcctatcatttcaggctctgctcttcaagccttagaagaggctaaggcgggacaagatggcgagtggtcagctaagattttagagcttatgaaggcagttgatgagtatatcccaactcctgttcgcgatactgaaaaagatttcttgatgcctattgaagatgttttttcaatttctggtcgtggaactgttgtaacaggtagaattgaaaaaggtgtggttaaagtcggcgatactattgagatagtaggtatcaaagatactcaaactacaacagttacaggcgttgagatgtttagaaaagaaatggatcaaggtgaggctggcgataatgtcggtgtgcttttaagaggaacaaaaaaagaagatgttcttcgtggtatggttcttgcaaagcctaaatctatcactcctcatactgattttgaagcagaagtttatattctaaataaagatgagggcggtcgccatactcctttctttaacaattatcgtccgcagttttatgtaagaacgactgatgtaactggttctattaaattagctgatggtgttgagatggttatgccgggtgaaaatgtaagaattacagttagccttatcgctccagttgcacttga

SEQ ID NO: 1679 - DNA, 783 bp, Globicatella sanguis ATCC 51173
ctgcagctgatggtccaatgcctcaaacacgtgaacatatcttattatcacgtcaagtaggtgttccttacatggttgtcttcttaaacaaagttgacatggttgacgatgaagaattattagaattagttgaaatggaagttcgtgatttattatctgaatacgaattccctggagacgacgttccagtaatcgctggttcagctttaaaagctttagaaggcgaagaacaatatgaagcaaaagtattagaattaatggaagctgtagatacatacattccagaaccagttcgtgatactgaaaaaccattcatgatgccagttgaagatgtgttctcaatcacaggtcgtggtacagttgctactggacgtgttgaacgtggacaagttaaagttggtgacgaagttgaaatcgttggtattgctgaagaaattagcaaaacaactgtaactggtgttgaaatgttccgtaaattattagattacgctgaagctggagataacattggtgcgttattacgtggtgttacacgtgaacaaatccaacgtggtcaagtattagcaaaaccaggaacaattacacctcatactaaattcgaggcggaagtttacgtattatcaaaagaagaaggtggacgtcatactccattcttcgctaactaccgtcctcaattctacttccgtacaactgacgttacaggtgttgtagaattaccagaaggtacagaaatggtaatgcctggagataacgtatcaatgacagttgaattaattcacccaa

SEQ ID NO: 1680 - DNA, 823 bp, Lactobacillus acidophilus ATCC 4356
gctatcttagttgttgctgcaactgatggtcctatgccacaaactcgtgaacacattttgcttgctcgtcaagttggtgttaactacatcgtagtattcttgaacaagtgcgatttagttgacgacccagaattgatcgacttggttgaaatggaagttcgtgacttgttgactgaatacgattaccctggtgatgatattccagttgttcgtggttcagcattaaaggctttacaaggtgacaaggaagctcaagaccaaatcatgaagttgatggacattgttgatgaatacatcccaactccagaacgtcaaactgacaagccattcttgatgccagttgaagacgtattcactatcactggtcgtggtactgttgcttcaggtcgtatcgaccgtggtactgttaaggtcggtgacgaagttgaaatcgttggtttggtagataaagttcttaagtcagttgttactggtttggaaatgttccacaagactttggacttaggtgaagccggcgataacgttggtgtattgcttcgtggtgttgaccgtgatcaagttgttcgtggtcaagtattggctgcacccggctcaatccaaactcataagaagtttaaggcacaagtttatgttttgaagaaggacgaaggtggtcgtcacactccattcttctcagactaccgtccacaattctacttccacaccactgatattactggtgaaattgaattgccagaaggtactgaaatggttatgcctggtgataacactgaattcactgttactttgatcaagccagctgccatcgaaaagggtactaagt

SEQ ID NO: 1681 - DNA, 793 bp, Leuconostoc mesenteroides subsp. dextranicum ATCC 19255
gctgcaactgatggtcctatgccacaaacacgtgaacacatcttgttggcacgtcaagttggtgttgactacttggttgtcttcttgaacaagactgatttggttgatgatgaagaattagttgaattggttgaaatggaagttcgtgaattgttgtcagaatatgacttcccaggtgacgatattcctgtacttaagggttcagctttgaaggctttggaaggtgatcctgaacaagttaaggttatcgaagaattgatggatactgttgattcatacattccagaaccagcacgtgaaacagacaagccattcttgatgcctgtcgaagacgtcttcacaatcactggtcgtggtacagttgcttctggtcgtgttgaccgtggtgtattgactacaggaactgaaattgaaatcgttggtttgaaggacgaagttcaaaagactactgttacaggtatcgaaatgttccgtaagactttggaagaagctcaagcgggtgataacattggtgcattgttgcgtggtgttgatcgtagcaacattgaacgtggtcaagttttggcaaagccaggttcaattaagacacacaagaagttcaaggctgaagtttatgtcttgacaaaggaagaaggtggtcgtcatacaccattcttcactaactaccgtccacaattctacttccacacaactgatgttacaggtgttgttgaattgccagccggtgttgaaatggttatgcctggtgaccaagtgacattcgaaatcgaattgatctcaccagttgccatcg

SEQ ID NO: 1682 - DNA, 796 bp, Prevotella buccalis ATCC 35310; identical to SEQ ID NO: 1573

SEQ ID NO: 1683 - DNA, 800 bp, Ruminococcus bromii ATCC 27255
ggttgctgctactgacggcccgatgcctcagactcgtgagcacgttctgctcgctcgtcaggtgggtgtgcccgccatcgtcgtcgccctcaacaagtgcgacatggttgacgatgaggagctcattgagcttgtcgagatggaggtccgcgagctgctgacctcgcaggagttcgacggcgacaactgccctgtcgttcgcatctccgccttccaggccctccagggtgacgagaagtggacccagtcgatcctcgacctcatggacgccgtggacgagtacatcccgcagcctgagcgcgatctcgacaagcccttccttatgccgatcgaggacgtcttcaccatcaccggccgtggcaccgttgtcaccggtcgtgtcgagcgtggtgtcgtcaagactggcgaagaggtcgagatcgtcggtatccacgagaagacccagaagaccaccgttaccggtgtcgagatgttccgtaagatcctcgacgagggccgcgctggtgagaacgtcggcgttctgctccgtggcaccaagaaggaggacgtcgttcgcggcatggtcctctccaagcctggttccaccaccccccacaccgacttcgagggccaggtctacgtcctcaagaaggatgagggtggccgccacaagccgttcttctcccattacagcccccagttctacttccgtaccacggacgtgactggcactgttgagctccccgagggcaccgagatggtcatgcctggcgacaacaccgacatgactgtgcacctgattcacccggttgccatggagg

SEQ ID NO: 1684 - DNA, 545 bp, Paracoccidioides brasiliensis ATCC 32075
tgtctttattcaggaactgattgtatgtttcttctcgtttatatataacataccttctatatttcatgtgtttctaacgaactcatagaacaacattgccaaggctcacggtggttactccgtgttcaccggtgtcggtgagcgtacccgtgaaggaaacgatctgtaccacgaaatgcaggaaacccgcgtcatccagctggacggcgagtccaaagtcgccctcgtcttcggccagatgaacgagccccccggagcccgtgcccgtgttgccctgaccggtctgaccatcgctgaatacttccgtgacgaagaaggccaagatggtacgttcccccattccatatatgtttcttgtgcgctttgccaactaaacaccacctagtgctcctcttcatcgacaatatcttccgcttcacccaagccggttccgaagtgtccgccctgctaggccgcatcccctccgccgtcggctatcaacccaccctcgccgtcgacatgggtggtatgcaggagcgcatcacaactacaacaaaaggctccat

SEQ ID NO: 1685 - DNA, 1020 bp, Candida norvegica ATCC 36586
gatatcgctttatggaaattcgaaactccaaaattccacgttacygttatcgatgctccaggtcacagagatttcatcaagaatatgattacyggtacctcccaagctgattgtgctattttaatcattgctggtggtgttggtgaattcgaagctggtatctccaaagatggtcaaaccagagaacacgctttgttagctttcaccttaggtgtyaaacaattgattgttgccgttaacaaaatggactctgtcaaatgggatcaatcccgtttcgaagaaatcgtcaaggaagcttccggtttcatcaagaaagttggttacaacccaaagactgttccattcgttccaatctctggttggaatggtgacaacatgattgaagtytcwgctaacgcyccatggtacaaaggttgggaaaaggaaaccaaagcyggtgtcgttaaaggtaaaactttattagaagccattgatgctattgaaccaccttcaagaccaactgaaaaaccattgagattgccattgcaagatgtctacaagattggtggtatcggaaccgtaccagtcggtaragttgaaaccggtgtcattaaaccaggtatgattgttactttcgccccagccggtgttactactgaagtcaaatctgttgaaatgcatcacgaacaattagaagctggttacccaggtgacaatgttggtttcaacgtcaagaatgtttcagttaaagaaatcagaagaggtaahgttgctggtgactccaagaacgatccaccaaaaggtgctgaatctttcaacgctcaagttattgtcttgaaccatccaggtcaaatctytgctggttactytccagttttggattgtcacactgcccacattgcttgtaaattcgatgaaatcttggaaaagattgacagaagatccggtaagaaattggaagaaaatccaaaattcatcaaatctggtgacgctgctawtgtcaaatttgttccatwtaaaccattrtgtgttgaagctttc

SEQ ID NO: 1686 - DNA, 929 bp, Aspergillus nidulans strain WSA-176
tgctgcttccgatggtcaaatgtacgattgatattccttccagccagtcaggataacagctgataccagttgcaaataggccccagactcgtgagcacttgttgcttgcccgtcaggttggtgtccagaagatcgttgtcttcgtcaacaaggttgacgctgtcgatgaccctgagatgttggagcttgttgagctcgagatgcgtgagctcctcaacacttacggtttcgagggagaggagacccctatcatcttcggttccgccctgtgcgctctcgaaggccgccgcgaggacattggtactcagcgtattgactccctcctcgaggccgttgacacttggatccctaccccccagcgtgacttggacaagcccttcctgatgtccattgaggaagttttctccattggtggtcgtggtaccgtcgcctctggtcgtgtcgagcgtggtctcctcaagaaggataccgaagttgaaattcacggtgctgatggtattctgaagaccaaggtcaccgacattgagaccttcaagaagagctgcgatgagtctcgtgctggtgacaactccggtcttctcctccgtggtatccgtcgtgaggatgttcgtcgtggtatggtcatcgctgcccctggctccatcaaggcctccaagaagttcatggtctccatgtacgtcttgactgaggctgaaggtggccgcaagaacggcttcggtgccaactaccgcccccaggctttcatccgcactgctggtaagtttcgaactatttgattcattgatcacgtccctaactgttactttagacgaggcttgcgaccttcatttccctgatgaggccgacaaggaccgccacgtcatgcccggtgacaacgtcgaaatggtcctcaacctcaacaaccccgttgctgctgaggctggacagcg

SEQ ID NO: 1687 - DNA, 951 bp, Aspergillus terreus strain WSA-174
tgccgcttccgatggtcagatgtacgctcaagccccagtttccatataaacataaacgatctatcatcagcacaacgctgacttcttcgcttccaggccccagacccgtgagcacttgctgttggcccgtcaggtcggtgtccagaagatcgtggtcttcgtcaacaaggtcgatgccgttgatgacccggagatgttggagctcgttgagctggaaatgcgcgagctcctgaccagctacggattcgagggtgaagagacccccatcatcttcggttctgctctctgcgctcttgagggccgccgtcctgagattggtactgagaagattgacgagctgatgcacgccgtcgacacctggatccccaccccccagcgtgacctcgacaagcccttcctgatgtccgtcgaggaagtcttctccattgctggtcgtggtaccgtcgcttccggccgtgtcgagcgtggtattctgaagaaggatagcgaagtcgagatcatcggtggtgctttcgacgccacgaagaccaaggtcactgacatcgagaccttcaagaagtcttgcgacgagtctcgcgctggtgacaactctggtctcctcctccgtggtatccgtcgtgaggatgttcggcgtggtatggtcattgctgctcctggcagcaccaaggcccacgacaagttccttgtctctatgtacgtcctcactgaggctgagggtggccgtcgtaccggattcggtaccaactaccgcccccaggtcttcatccgtactgccggtaagtgttcctggaagaggctttgagcctatataggatctcggataatttactaatccaccatatagatgaggccgctgacctcagcttccccgacaacgatgactcccgccgtgtcatgcccggtgacaacgttgagatggtcctgaagacccaccgccccgtggctgctgag

SEQ ID NO: 1688 - DNA, 823 bp, Candida norvegica ATCC 36586
cgttgccgctaccgatggtcaaatgcctcaaactagagaacatttgctattggctagacaggttggtgttcaacacattgtcgtgtttgttaacaaggttgacactattgatgatccagaaatgttggaattggttgaaatggaaatgagagagttgattgccacttatggtttcgatggtgataacaccccagttatcatgggttctgctctatgtgctttggaaggtcgtgaacctgaaatcggtgctcaatcaatcgacagattgttggaagccgttgatgaatacattccaactccaactagagatttggaaaaaccattcttgatgggtgttgaagatgtcttctccatttctggtagaggtaccgtctgtaccggtcgtgttgaaagaggtaacttgaagaaaggtgatgaaatcgaaattgtcggctacaacaagactccaatcaaaaccaccgtcaccggtattgagatgttcaaaaaggaattagaccaagctatggctggtgataactgtggtatcttattacgtggtgttaagagagatgatatcaagagaggtatggttatctctaaagtcaacaccgtttccgcacacaccaaattcttggcctctttatacgtcttgactaaagaagaaggtggtcgtcattcaggttttgctgaaaactacagacctcaattgttcatcagaaccggtgatgtcactgttactttaaccttcccagaagatgctgatcactctcagcaagtcttaccaggtgacaacgttgaaatggaatgtaccttggttcatccaactgctcttgaaaccggtcaa

SEQ ID NO: 1689 - DNA, 803 bp, Candida parapsilosis ATCC 201076
gctgctactgacggtcaaatgcctcaaactagggaacatatgttgttggcgagacaagttggtatccaaaacttggttgtttttgttaacaaagttgataccattgatgacccagaaatgttggaattggttgaaatggaaatgagggaattattgagctcttatgggtttgatggtgaaaacactccagttatcatgggatcagccttgtgtgctttagaaggtaaacaaccagaaatcggtgttcaagccattcaaaaattattggatgctgttgatgaatatattccaactccagaaagagatgctgaccaaccatttttgatgccagtggaagatgtgttttctatttcaggtagaggaaccgttgtcaccggaagagttgaaagaggtatgttgaagaaaggtgaagaagtakaagtcattggtgaaaactcatttaaggctacttccacgggtattgagatgttcaaaaaggaattggatgccgctatggccggtgacaactgtggtattttgttgagaggtgtcaagagagacgaagtcaagaggggtatggttttggccaaaccaggtaccaccaccccacaccaaaagtttttggcttccatttatatcttgactgctgaagaaggtggacgtagtacccctttcagtgaaggatacaaaccacaatgtttctttagaactagtgatgttaccacgacatttactttcccagaaggtgaaggtgttgaccactcacaaatggttatgccaggagrcaatgttgaaatggtgggaactttaatcaagaaagctcc

SEQ ID NO: 1690 - DNA, 23 bp, Artificial Sequence
  Synthetic DNA Sequence
caggtcctgttgcgactgaagaa

SEQ ID NO: 1691 - DNA, 25 bp, Artificial Sequence
  Synthetic DNA Sequence
cacagataaacctgagtgtgctttc

SEQ ID NO: 1692 - DNA, 24 bp, Artificial Sequence
  Synthetic DNA Sequence
ggtgagaactgtggtatcttactt

SEQ ID NO: 1693 - DNA, 24 bp, Artificial Sequence
  Synthetic DNA Sequence
catttcaacgccttctttcaactg

SEQ ID NO: 1694 - DNA, 20 bp, Artificial Sequence
  Synthetic DNA Sequence
aaggcaaggatgacaacggc

SEQ ID NO: 1695 - DNA, 21 bp, Artificial Sequence
  Synthetic DNA Sequence
acgatttccacttcttcctgg

SEQ ID NO: 1696 - DNA, 20 bp, Artificial Sequence
  Synthetic DNA Sequence
atgttcctgtagttgctgga

SEQ ID NO: 1697 - DNA, 22 bp, Artificial Sequence
  Synthetic DNA Sequence
tttcttcagcaataccaacaac

SEQ ID NO: 1698 - DNA, 23 bp, Artificial Sequence
  Synthetic DNA Sequence
ggaatcaacagatggtttacaaa

SEQ ID NO: 1699 - DNA, 20 bp, Artificial Sequence
  Synthetic DNA Sequence
gcatcttctgggaaaggtgt

SEQ ID NO: 1700 - DNA, 20 bp, Artificial Sequence
  Synthetic DNA Sequence
aagatgcggaaagaagcgaa

SEQ ID NO: 1701 - DNA, 23 bp, Artificial Sequence
  Synthetic DNA Sequence
attatggatcagttcttggatca

SEQ ID NO: 1702 - DNA, 213 bp, Streptococcus gordonii strain Challis V288
ttcatagacgctgagcacgctttggatccatcttacgcggctgctctaggtgtaaatattgatgagctgttgctatctcaaccagattctggtgagcaaggtttagaaattgcaggaaaattgattgactctggggcagttgatttagttgtcatcgactctgttgcagctcttgtaccacgtgcggaaatcgatggagatatcggtgatagc

SEQ ID NO: 1703 - DNA, 692 bp, Streptococcus mutans strain GS-5
gggccggaatcttctggtaagacaactgtcgctcttcatgctgctgctcaggcgcaaaaagatggcggtattgccgctttcattgatgcagaacatgcccttgatccagcctatgctgctgctcttggcgttaatattgatgagcttttgctttcacaaccagattcaggagaacagggtcttgaaattgcagggaaattgattgattctggcgctgttgatttagttgttgttgactcagtggcagctttagtaccacgtgcggagattgacggagatattggtaatagtcatgttggcttacaagcacgcatgatgagtcaagcgatgcgtaaattatcagcttcaatcaataaaacaaaaaccattgctatttttattaatcaattgcgggaaaaagttggtattatgtttggtaatccagaaacaacccctggcgggcgtgccttgaagttttattcttctgtgcgtcttgatgtccgcggcaatactcaaattaaaggaaccggggaacaaaaagacagcaatattggtaaagagaccaaaattaaagttgttaaaaataaagttgctccaccatttaaggaagcttttgtagaaattatatatggtgaaggcatttctcgtacaggtgaattagttaagattgccagtgatttgggaattatccaaaaagctggagcttggtactc

SEQ ID NO: 1704 - DNA, 1204 bp, Streptococcus pneumoniae
atggcgaaaaaaccaaaaaaattagaagaaatttcaaaaaaatttggggcagaacgtgaaaaggccttgaatgacgctcttaaattgattgagaaagactttggtaaaggatcaatcatgcgtttgggtgaacgtgcggagcaaaaggtgcaagtgatgagctcaggttctttagctcttgacattgcccttggctcaggtggttatcctaagggacgtatcatcgaaatctatggcccagagtcatctggtaagacaacggttgcccttcatgcagttgcacaagcgcaaaaagaaggtgggattgctgcctttatcgatgcggaacatgcccttgatccagcttatgctgcggcccttggtgtcaatattgacgaattgctcttgtctcaaccagactcaggagagcaaggtcttgagattgcgggaaaattgattgactcaggtgcagttgatcttgtcgtagtcgactcagttgctgcccttgttcctcgtgcggaaattgatggagatatcggagatagccatgttggtttgcaggctcgtatgatgagccaggccatgcgtaaacttggcgcctctatcaataaaaccaaaacaattgccatttttatcaaccaattgcgtgaaaaagttggagtgatgtttggaaatccagaaacaacaccgggcggacgtgctttgaaattctatgcttcagtccgcttggatgttcgtggtaatacacaaattaagggaactggtgatcaaaaagaaaccaatgtcggtaaagaaactaagattaaggttgtaaaaaataaggtagctccaccgtttaaggaagccgtagttgaaattatgtacggagaaggaatttctaagactggtgagcttttgaagattgcaagcgatttggatattatcaaaaaagcaggggcttggtattcttacaaagatgaaaaaattgggcaaggttctgagaatgctaagaaatacttggcagagcacccagaaatctttgatgaaattgataagcaagtccgttctaaatttggcttgattgatggagaagaagtttcagaacaagatactgaaaacaaaaaagatgagccaaagaaagaagaagcagtgaatgaagaagttccgcttgacttaggcgatgaacttgaaatcgaaattgaagaataagctgttaaagcagtggagaaatccgctactttttcga

SEQ ID NO: 1705 - DNA, 981 bp, Streptococcus pyogenes strain NZ131
atgcgttcaggaagtctagctcttgatattgcttggatagctggtggttatcctaaaggacgtatcatcgaaatctatggtccagagtcttccggtaaaacgactgtggctttacatgctgtagcacaagctcaaaaagaaggtggaatcgcagcctttatcgatgccgagcatgcgcttgatccagcttatgctgctgcgcttggggttaatattgatgaacttctcttgtctcaaccagattctggagaacaaggacttgaaattgcaggtaaattgattgattctggtgcggttgacctggttgttgtcgattcagtagcagctttagtgccacgtgctgaaattgatggtgatattggcgatagccatgtcggattgcaagcacgtatgatgagtcaggccatgcgtaaattatcagcttctattaataaaacaaaaactatcgcaatctttatcaaccaattgcgtgaaaaagttggtgtgatgtttggaaatcctgaaacaacaccaggtggtcgagctttgaaattctatgcttctgttcggctggatgtgcgtggaaacaaccaaattaaaggaactggtgaccaaaagatagccagcattggtaaggagaccaaaatcaaggttgttaaaaacaaggtcgctccgccatttaaggtagcagaagttgaaatcatgtatggggaaggtatttctcgtacaggggagcttgtgaaaattgcttctgatttggacattatccaaaaagcaggtgcttggttctcttataatggtgagaagattggccaaggttctgaaaatgctaagcgttatttggccgatcatccacaattgtttgatgaaatcgaccgtaaagtacgtgttaaatttggtttgcttgaagaaagcgaagaagaatctgctatggcagtagcatcagaagaaaccgatgatcttgctttagatttagataatggtattgaaattgaagattaa

SEQ ID NO: 1706 - DNA, 312 bp, Streptococcus salivarus subsp. thermophilus
gcgtatgcacgagctctaggtgttaatatcgatgagcttcttttgtcgcagcctgattctggtgagcaaggtctcgaaattgcaggtaagctgattgactctggtgcagtggatttagttgttgttgactcagttgcggccttcgtaccacgtgcagaaattgatggagatagtggtgacagtcatgtaggacttcaagcgcgtatgatgagtcaagccatgcgtaaactttctgcatctattaataaaacaaaaacgattgctatctttattaaccagttgcgtgaaaaagttggtatcatgtttggtaac

SEQ ID NO: 1707 - DNA, 831 bp, Escherichia coli
atgaaaaacacaatacatatcaacttcgctatttttttaataattgcaaatattatctacagcagcgccagtgcatcaacagatatctctactgttgcatctccattatttgaaggaactgaaggttgttttttactttacgatgcatccacaaacgctgaaattgctcaattcaataaagcaaagtgtgcaacgcaaatggcaccagattcaactttcaagatcgcattatcacttatggcatttgatgcggaaataatagatcagaaaaccatattcaaatgggataaaacccccaaaggaatggagatctggaacagcaatcatacaccaaagacgtggatgcaattttctgttgtttgggtttcgcaagaaataacccaaaaaattagattaaataaaatcaagaattatctcaaagattttgattatggaaatcaagacttctctggagataaagaaagaaacaacggattaacagaagcatggctcgaaagtagcttaaaaatttcaccagaagaacaaattcaattcctgcgtaaaattattaatcacaatctcccagttaaaaactcagccatagaaaacaccatagagaacatgtatctacaagatctggataatagtacaaaactgtatgggaaaactggtgcaggattcacagcaaatagaaccttacaaaacggatggtttgaagggtttattataagcaaatcaggacataaatatgtttttgtgtccgcacttacaggaaacttggggtcgaatttaacatcaagcataaaagccaagaaaaatgcgatcaccattctaaacacactaaatttataa

SEQ ID NO: 1708 - DNA, 846 bp, Enterococcus faecalis strain HH22
ttgaaaaagttaatatttttaattgtaattgctttagttttaagtgcatgtaattcaaacagttcacatgccaaagagttaaatgatttagaaaaaaaatataatgctcatattggtgtttatgctttagatactaaaagtggtaaggaagtaaaatttaattcagataagagatttgcctatgcttcaacttcaaaagcgataaatagtgctattttgttagaacaagtaccttataataagttaaataaaaaagtacatattaacaaagatgatatagttgcttattctcctattttagaaaaatatgtaggaaaagatatcactttaaaagcacttattgaggcttcaatgacatatagtgataatacagcaaacaataaaattataaaagaaatcggtggaatcaaaaaagttaaacaacgtctaaaagaactaggagataaagtaacaaatccagttagatatgagatagaattaaattactattcaccaaagagcaaaaaagatacttcaacacctgctgctttcggtaagactttaaataaacttatcgcaaatggaaaattaagcaaagaaaacaaaaaattcttacttgatttaatgttaaataataaaagcggagatactttaattaaagacggtgttccaaaagactataaggttgctgataaaagtggtcaagcaataacatatgcttctagaaatgatgttgcttttgtttatcctaagggccaatctgaacctattgttttagtcatttttacgaataaagacaataaaagtgataagccaaatgataagttgataagtgaaaccgccaagagtgtaatgaaggaattttaa

SEQ ID NO: 1709 - DNA, 555 bp, Pseudomonas aeruginosa
atgtccgcgagcaccccccccataactcttcgcctcatgaccgagcgcgacctgccgatgctccatgactggctcaaccggccgcacatcgttgagtggtggggtggcgacgaagagcgaccgactcttgatgaagtgctggaacactacctgcccagagcgatggcggaagagtccgtaacaccgtacatcgcaatgctgggcgaggaaccgatcggctatgctcagtcgtacgtcgcgctcggaagcggtgatggctggtgggaagatgaaactgatccaggagtgcgaggaatagaccagtctctggctgacccgacacagttgaacaaaggcctaggaacaaggcttgtccgcgctctcgttgaactactgttctcggaccccaccgtgacgaagattcagaccgacccgactccgaacaaccatcgagccatacgctgctatgagaaggcaggattcgtgcgggagaagatcatcaccacgcctgacgggccggcggtttacatggttcaaacacgacaagccttcgagagaaagcgcggtgttgcctaa

SEQ ID NO: 1710 - DNA, 732 bp, Staphylococcus aureus
atgaaccagaaaaaccctaaagacacgcaaaattttattacttctaaaaagcatgtaaaagaaatattgaatcacacgaatatcagtaaacaagacaacgtaatagaaatcggatcaggaaaaggacattttaccaaagagctagtcaaaatgagtcgatcagttactgctatagaaattgatggaggcttatgtcaagtgactaaagaagcggtaaacccctctgagaatataaaagtgattcaaacggatattctaaaattttccttcccaaaacatataaactataagatatatggtaatattccttataacatcagtacggatattgtcaaaagaattacctttgaaagtcaggctaaatatagctatcttatcgttgagaagggatttgcgaaaagattgcaaaatctgcaacgagctttgggtttactattaatggtggagatggatataaaaatgctcaaaaaagtaccaccactatattttcatcctaagccaagtgtagactctgtattgattgttcttgaacgacatcaaccattgatttcaaagaaggactacaaaaagtatcgatcttttgtttataagtgggtaaaccgtgaatatcgtgttcttttcactaaaaaccaattccgacaggctttgaagcatgcaaatgtcactaatattaataaactatcgaaggaacaatttctttctattttcaatagttacaaattgtttcactaa

SEQ ID NO: 1711 - DNA, 738 bp, Escherichia coli strain BM2570
atgaacaaaaatataaaatattctcaaaactttttaacgagtgaaaaagtactcaaccaaataataaaacaattgaatttaaaagaaaccgataccgtttacgaaattggaacaggtaaagggcatttaacgacgaaactggctaaaataagtaaacaggtaacgtctattgaattagacagtcatctattcaacttatcgtcagaaaaattaaaatcgaatactcgtgtcactttaattcaccaagatattctacagtttcaattccctaacaaacagaggtataaaattgttgggaatattccttaccatttaagcacacaaattattaaaaaagtggtttttgaaagccatgcgtctgacatctatctgattgttgaagaaggattctacaagcgtaccttggatattcaccgaacactagggttgctcttgcacactcaagtctcgattcagcaattgcttaagctgccagcggaatgctttcatcctaaaccaagagtaaacagtgtcttaataaaacttacccgccataccacagatgttccagataaatattggaagctatatacgtactttgtttcaaaatgggtcaatcgagaatatcgtcaactgtttactaaaaatcagtttcatcaagcaatgaaacacgccaaagtaaacaatttaagtaccgttacttatgagcaagtattgtctatttttaatagttatctattatttaacgggaggaaataa

SEQ ID NO: 1712 - DNA, 735 bp, Staphylococcus aureus strain RN451
atgaacgagaaaaatataaaacacagtcaaaactttattacttcaaaacataatatagataaaataatgacaaatataagattaaatgaacatgataatatctttgaaatcggctcaggaaaagggcattttacccttgaattagtacagaggtgtaatttcgtaactgccattgaaatagaccataaattatgcaaaactacagaaaataaacttgttgatcacgataatttccaagttttaaacaaggatatattgcagtttaaatttcctaaaaaccaatcctataaaatatttggtaatataccttataacataagtacggatataatacgcaaaattgtttttgatagtatagctgatgagatttatttaatcgtggaatacgggtttgctaaaagattattaaatacaaaacgctcattggcattatttttaatggcagaagttgatatttctatattaagtatggttccaagagaatattttcatcctaaacctagagtgaatagctcacttatcagattaaatagaaaaaaatcaagaatatcacacaaagataaacagaagtataattatttcgttatgaaatgggttaacaaagaatacaagaaaatatttacaaaaaatcaatttaacaattccttaaaacatgcaggaattgacgatttaaacaatattagctttgaacaattcttatctcttttcaatagctataaattatttaataagtaa

SEQ ID NO: 1713 - DNA, 1029 bp, Enterococcus faecalis strain V583
atgaataaaataaaagtcgcaattatcttcggcggttgctcggaggaacatgatgtgtcggtaaaatccgcaatagaaattgctgcgaacattaatactgaaaaattcgatccgcactacatcggaattacaaaaaacggcgtatggaagctatgcaagaagccatgtacggaatgggaagccgatagtctccccgccatattctccccggataggaaaacgcatggtctgcttgtcatgaaagaaagagaatacgaaactcggcgtattgacgtggctttcccggttttgcatggcaaatgcggggaggatggtgcgatacagggtctgtttgaattgtctggtatcccctatgtaggctgcgatattcaaagctccgcagcttgcatggacaaatcactggcctacattcttacaaaaaatgcgggcatcgccgtccccgaatttcaaatgattgaaaaaggtgacaaaccggaggcgaggacgcttacctaccctgtctttgtgaagccggcacggtcaggttcgtcctttggcgtaaccaaagtaaacagtacggaagaactaaacgctgcgatagaagcagcaggacaatatgatggaaaaatcttaattgagcaagcgatttcgggctgtgaggtcggctgcgcggtcatgggaaacgaggatgatttgattgtcggcgaagtggatcaaatccggttgagccacggtatcttccgcatccatcaggaaaacgagccggaaaaaggctcagagaatgcgatgattatcgttccagcagacattccggtcgaggaacgaaatcgggtgcaagaaacggcaaagaaagtatatcgggtgcttggatgcagagggcttgctcgtgttgatctttttttgcaggaggatggcggcatcgttctaaacgaggtcaataccctgcccggttttacatcgtacagccgctatccacgcatggcggctgccgcaggaatcacgcttcccgcactaattgacagcctgattacattggcgatagagaggtga

SEQ ID NO: 1714 - DNA, 818 bp, Campylobacter jejuni subsp. jejuni ATCC 33292
gcacaggttcagttgggcttgatcttgctttaggtataggcggtgttccaaaaggaagaattatagaaatttatggrcctgaaagttcaggtaaaaccactctaactctacacattatcgcagaatgccaaaaagcaggtggrgtttgtgcttttatcgatgcagaacatgcrcttgatgtraaatatgctaaaaatttgggtgtaaatacagatgatttgtatgtttctcagcctgattttggagarcaagccttagaaattgtagaaactatagcaagaagtggcgcagtagatcttatcgtagtagatagcgttgcagcgcttaccccaaaagcagaaattgaaggcgatatgggtgatcaacatgtaggacttcaagcaagacttatgtctcaagctctaagaaaacttacaggtatagttcataaaatgaataccacagtaattttyatcaaccaaattcgtatgaaaatcggtgctatgggttatggtactcctgaaaccacaacaggtggaaatgcattaaaattttatgcttctgtgcgtttagatgttagaaaagtagcaaccttaaaacaaaacgaagaacctataggaaaccgcgttaaagtaaaagtagttaaaaataaagttgctcctccattcagacaagctgaatttgatgtgatgtttggagagggtttaagccgtgaaggtgaattgatcgattatggtgtaaaacttgatatcgtagataaaagtggtgcgtggttttcttataaagataaaaaacttggacaaggtagagaaaattcaaaagctttcttaaaagaaaac

SEQ ID NO: 1715 - DNA, 809 bp, Abiotrophia adiacens ATCC 49175
tggtgctatcttagtagtatctgcagctgatggtccaatgcctcaaacacgtgaacacatcttattatcacgtcaagtaggtgttccttacatcgttgtattcttaaacaaagttgacatggttgacgatgaagaattattagaattagtagaaatggaagttcgtgacttattatcagaatacgatttcccaggcgatgacactccagttgttgcaggttctgctttacgcgctttagaaggcgacgcttcatacraagaaaaaatcttagaattaatggctgctgttgacgaatacattccaactccagaacgygacgttgacaaaccattcatgatgccagttgaagacgtgttctcaatcacaggtcgtggtactgttgctacaggtcgtgttgaacgtggacaagttcgtgttggtgacgaagttgaaatcgttggtatttcagaagaaacttcaaaaacaactgtaactggtgttgaaatgttccgtaaattgttagactacgctgaagcaggggataacattggtacattattacgtggtgttacacgtgacaacatcgaacgtggacaagttcttgctaaaccaggaacaatcactccacatactaaattcaaagctgaagtttacgtattaactaaagaagaaggtggacgtcatactccattcttctctaactaccgtcctcaattctacttccgtacaacagacatcactggtgtttgtgtgttaccagaaggcgttgaaatggtaatgcctggtgataacgtaactatggaagttgaattaattcacccagtagcga

SEQ ID NO: 1716 - DNA, 817 bp, Abiotrophia defectiva ATCC 49176
cggcgcgatcctcgttgtatctgctgctgacggcccaatgccacaaactcgtgaacacatcctcttgtctcgtcaagttggtgttccttacatcgtagtattcttgaacaaagttgacatggttgacgacgaagaattgctcgaattagttgaaatggaagttcgtgacctcttgtctgaatacgacttcccaggcgacgacactccagttatcgctggttcagctttgaaagctttagaaggcgacgctaactacgaagctaaagttttagaattgatggaacaagttgatgcttacattccagaaccagaacgtgacactgacaagccattcatgatgccagtcgaagacgtattctctatcactggtcgtggtactgttgcaactggtcgtgttgaacgtggtcaagttcgcgttggtgacgaagttgaaatcgttggtatcgaagaagaaacttctaagactaccgttaccggtgttgaaatgttccgtaagttattggattacgctgaagctggggacaacgttggtaccttgttacgtggtgtaactcgtgaccaaatccaacgtggtcaagtattatctaaaccaggttcaatcactccgyacactaagttcgaagctgaagtgtacgtattgtctaaagaagaaggtggtcgtcacactccattcttctctaactaccgtccacaattctacttccgtacaactgacgtaactggtgttgttactttaccagaaggtactgaaatggttatgccaggcgacaacgtacaaatggttgttgaattgatccacccaatcgcgatcgaagaa

SEQ ID NO: 1717 - DNA, 814 bp, Corynebacterium accolens ATCC 49725
cggcgctatcctggttgttgctgcaaccgatggcccgatgccgcagacccgcgagcacgttctgcttgctcgccaggttggcgttccttacatcctcgttgcactgaacaagtgcgacatggttgatgatgaggaaatcatcgagctcgtggagatggagatctccgagctgctcgcagagcaggactacgatgaggaagctcctatcgttcacatctccgctctgaaggcactcgagggtgacgagaagtgggtacagtccatcgttgacctgatggatgcctgcgacaactccatccctgatccggagcgcgctaccgatcagccgttcttgatgcctatcgaggacatcttcaccattaccggccgcggtaccgttgttaccggccgtgttgagcgtggtcgtctgaacgtcaacgaggacgttgagatcatcggtatccaggagaagtcccagaacaccaccgttaccggtatcgagatgttccgcaagatgatggactacaccgaggctggcgacaactgtggtctgcttctgcgtggtaccaagcgtgaggacgttgagcgtggccaggttgttatcaagccgggcgcttacacccctcacaccaagttcgagggttccgtctacgtcctgaagaaggaagagggcggccgccacaccccgytcatgaacaactaccgtcctcagttctacttccgcaccaccgacgttaccggtgttgtgaacctgcctgagggcaccgagatggttatgcctggcgacaacgttgagatgtctgttgagctcatccagcctgttgctatggacgag

SEQ ID NO: 1718 - DNA, 814 bp, Corynebacterium genitalium ATCC 33031
cggcgccatcctggttgttgctgcaaccgatggcccgatgccgcagacccgtgagcacgttctgctggctcgccaggttggcgttccgtacatcctagttgcactgaacaagtgcgacatggttgatgatgaggagctgctggagctcgtcgagatggaggtccgcgagctgctggctgagcaggacttcgacgaggaagcacctgttgttcacatctccgcactgaaggccctggagggcgacgagaagtgggctaagcagatcctggagctcatggaggcttgcgacaactccatcccggatccggagcgcgagaccgacaagccgttcctgatgccggttgrggacatcttcaccattaccggccgcggtaccgttgttaccggccgtgttgagcgtggcgtcctgaacctgaacgacgaggtcgagatcctgggcatccgcgagaagtccaccaagaccaccgttacctccatcgagatgttcaacaagctgctggacaccgcagaggctggcgacaacgccgcactgctgctgcgtggcctgaagcgcgaagatgttgagcgtggtcagatcgttgctaagccgggcgagtacaccccgcacaccgagttcgagggctccgtctacgttctgtccaaggacgagggtggccgccacaccccgttcttcgacaactaccgtccgcagttctatttccgcaccaccgacgttaccggtgttgtgaagctgccggagggcaccgagatggttatgccgggcgacaacgttgacatgtccgtcaccctgatccagccggttgctatggacgag

SEQ ID NO: 1719 - DNA, 814 bp, Corynebacterium jeikeium ATCC 43216
cggcgccatcctggttgttgccgcaaccgatggcccgatgccgcagacccgcgagcacgttctgctggcycgccaggttggcgttccgtacatcctggttgcactgaacaagtgtgacatggttgacgatgaggagctgctggagctcgtcgagatggaggtccgcgagctgctggctgagcaggacttcgacgaggaagctccggttgttcacatctccgcactgaaggccctggagggcgacgagaagtgggctaaccagattctcgagctgatgcaggcttgcgacgagtctatcccggatccggagcgcgagaccgacaagccgttcctgatgccggttgwggacatcttcaccattaccggtcgcggtaccgttgttaccggccgtgttgagcgtggcatcctgaacctgaacgacgaggttgagatcctgggtatccgcgagaagtcccagaagaccaccgttacctccatcgagatgttcaacaagctgctggacaccgcagaggctggcracaacgctgcactgctgctgcgtggtctgaagcgcgaggacgttgagcgtggccagatcatcgctaagccgggcgagtacaccccgcacaccgagttcgagggctccgtctacgttctgtccaaggacgagggcggccgccacaccccgttcttcgacaactaccgtccgcagttctacttccgcaccaccgacgttaccggtgttgtgaagctgcctgagggcaccgagatggttatgccgggcgacaacgtygacatgtccgtcaccctgatccagccggttgctatggacgag

SEQ ID NO: 1720 - DNA, 748 bp, Corynebacterium pseudodiphtheriticum ATCC 10700
cggcgctatcttggttgttgcagctaccgacggcccaatgccacagactcgcgagcacgttctgctggctcgccaggttggcgttccttacatcctggttgcactaaacaagtgcgacatggttgacgacgaggaaatcctcgagctcgtcgagatggagatccgcgaattgctggctgaccaggaattcgacgaagaagctccaatcgttcacatctccgcagtcggcgccttggaaggcgaagagaggtgggttaacgccatcgttgaactgatggatgcttgtgacgagtcgatccctgatccagaccgtgctaccgacaagccattcctgatgcctatcgaggacatcttcaccattaccggtcgtggcaccgttgttacgggtcgtgttgagcgtggttccctgaaggtcaacgaagaagtcgagatcatcggcatcaaggaaaagtcccagaagaccaccatcaccggtatcgaaatgttccgcaagatgctggactacaccgaggccggcgacaacgctggtctgctgcttcgcggtaccaagcgtgaagacgttgagcgtggacaggttatcgttgctccaggtgcttacagcacccacaagaagttcgaaggttccgtctacgttctttccaaggacgagggcggccgccacaccccgttcttcgacaactaccgtcctcagttctacttccgcaccaccgacgttaccggtgttgttaccctgcctgagggcaccgag

SEQ ID NO: 1721 - DNA, 813 bp, Corynebacterium striatum ATCC 6940
ggcgctatcttggttgttgctgcaaccgatggcccgrtgccgcagacccgcgagcacgttcttctggctcgccaggttggcgttccttacatcctcgttgcactgaacaagtgcgacatggttgacgacgaggaaattatcgagctcgtcgagatggagatccgcgaactgctcgcagagcaggactacgatgaggaagctccgatcgttcacatctctgctctgaaggctcttgagggcgrcgagaagtgggtacaggctatcgttgacctgatgcaggcttgcgatgactccatcccggatccggagcgcgagctggacaagccgttcctgatgccaatcgaggacatcttcaccatcaccggccgcggtaccgttgttactggccgtgttgagcgtggctccctgaacgtcaacgaggacgttgagatcatcggtatccaggacargtccatctccaccaccgttaccggtatcgagatgytccgcaagatgatggactacaccgaggctggcgacaactgtggtctgcttctgcgtggtaccaagcgtgaagaggttgagcgcggccaggttgttattaagccgggcgcttacacccctcacacccagttcgagggttccgtctacgtcctgaagaaggaagagggcggccgccacaccccgttcatggacaactaccgtccgcagttctacttccgcaccaccgacgttaccggcgtcatcaagctgcctgagggcaccgagatggttatgcctggcgacaacgtcgagatgtcygtcgagctgatccagccggtcgctatggacgag

SEQ ID NO: 1722 - DNA, 817 bp, Enterococcus avium ATCC 14025
cggagctatcttagtagtatctgctgctgatggccctatgcctcaaactcgtgaacacatcttgttatctcgtaacgttggtgttccttacatcgttgtattcttaaacaaaatggatatggttgacgatgaagaattacttgaattagttgaaatggaagttcgtgacttattaactgaatacgacttcccaggcgacgacactccagttatcgcaggttcagcgttgaaagctttagaaggcgacgcttcatacgaagaaaaaatcttagaattaatggctgctgttgacgaatatatcccaacaccagttcgtgatactgacaaaccattcatgatgccagtcgaagacgtattctcaatcactggtcgtggtactgttgcaactggtcgtgttgaacgtggacaagttcgcgttggtgacgaagttgaaatcgtaggtatcgctgacgaaactgctaaaacaactgttacaggtgttgaaatgttccgtaaattgttagactacgctgaagcaggtgacaacatcggtgctttgttacgtggtgttgcacgtgaagatatccaacgtggacaagtattggctaaaccagcttcaatcactccacatacaaaattctctgcagaagtttatgttctaactaaagaagaaggtggacgtcatactccattcttcactaactaccgtcctcagttctacttccgtacaactgacgtaactggtgtagttgatctaccagaaggtactgaaatggtwatgcctggggataacgtaactatggaagttgaattgatycacccaatygcggtagaagac

SEQ ID NO: 1723 - DNA, 823 bp, Gardnerella vaginalis ATCC 14018
tggcgcaatcctcgtggttgctgctaccgacggtccaatggctcagacccgtgaacacgtcttgcttgctaagcaggtcggcgttccaaaaattcttgttgctttgaacaagtgcgatatggttgacgacgaagagcttatcgatctcgttgaagaagaggtccgtgacctcctcgaagaaaacggcttcgatcgcgattgcccagtcytccgtacttccgcttacggcgctttgcatgatgacgctccagaccacgacaagtgggtagagaccgtcaaggaactcatgaaggctgttgacgagtacatcccaaccccaactcacgatcttgacaagccattcttgatgccaatcgaagatgtgttcaccatctccggtcgtggtyccgttgtcaccggtcgtgttgagcgtggtaagctcccaatcaacaccccagttgagatcgttggtttgcgcgatacccagaccaccaccgtcacctctatcgagaccttccacaagcagatggatgaggcagaggctggcgataacactggtcttcttctccgcggtatcaaccgtaccgacgttgagcgtggtcaggttgtggctgctccaggttctgtgactccacacaccaagttcgaaggcgaagtttacgtcttgaccaaggacgaaggtggccgtcactcgccattcttctccaactaccgtccacagttctacttccgtaccaccgatgttactggcgttatcaccttgccagacggcatcgaaatggttcagccaggcgatcacgcaaccttcactgttgagttgatccaggctatcgcaatggaagag

SEQ ID NO: 1724 - DNA, 817 bp, Listeria innocua ATCC 33090
cggagctatcttagtagtatctgctgctgatggcccaatgccacaaactcgtgaacatatcttactttcacgtcaagttggtgttccatacatcgttgtattcatgaacaaatgtgacatggttgacgatgaagaattactagaattagttgaaatggaaattcgtgatctattaactgaatatgaattccctggcgatgacattcctgtaatcaaaggttcagctcttaaagcacttcaaggtgaagctgactgggaagctaaaattgacgagttaatggaagctgtagattcttacattccaactccagaacgtgatactgacaaaccattcatgatgccagttgaggatgtattctcaatcactggtcgtggaacagttgcaactggacgtgttgaacgtggacaagttaaagttggtgacgaagtagaagttatcggtattgaagaagaaagcaaaaaagtagtagtaactggagtagaaatgttccgtaaattactagactacgctgaagctggcgacaacattggcgcacttctacgtggtgttgctcgtgaagatatccaacgtggtcaagtattagctaaaccaggttcgattactccacacactaacttcaaagctgaaacttatgttttaactaaagaagaaggtggacgtcacactccattcttcaacaactaccgcccacaattctatttccgtactactgacgtaactggtattgttacacttccagaaggtactgaaatggtaatgcctggtgataacattgagcttgcagttgaactaattgcaccaatcgctatcgaagac

SEQ ID NO: 1725 - DNA, 818 bp, Listeria ivanovii ATCC 19119
cggagctatcttagtagtatctgctgctgatggtccaatgccacaaactcgtgaacatattcttactttcacgtcaagttggtgttccatacatcgttgtattcatgaacaaatgtgacatggttgacgatgaagaattacttgaattagttgaaatggaaattcgtgatctattaactgaatatgaattccctggcgacgacattcctgtaatcaaaggttcagctcttaaagcacttcaaggtgaagctgattgggaagctaaaattgacgagttaatggaagctgtagattcttacattccaactccagaacgtgatactgacaaaccattcatgatgccagttgaggatgtattctcaatcactggtcgtggaacagttgcaactggacgtgttgaacgtggacaagttaaagttggtgacgaagtagaagttatcggtattgaagaagaaagcaaaaaagtagtagtaactggagtagaaatgttccgtaaattactagactacgctgaagctggcgacaacattggcgcacttctacgtggtgttgctcgtgaagatatccaacgtggtcaagtattagctaaaccaggttcgattactccacatactaacttcaaagctgaaacttatgttttaactaaagaagaaggtggacgtcatactccattcttcaacaactaccgcccacaattctatttccgtactactgacgtaactggtattgttacacttccagaaggtactgaaatggtaatgcctggtgataacattgagcttgcagttgaactaattgcaccaatcgctatcgaagac

SEQ ID NO: 1726 - DNA, 817 bp, Listeria monocytogenes strain LSPQ 5093202
cggagctatcttagtagtatctgctgctgatggcccaatgccacaaactcgtgaacatatcttactttcacgtcaagttggtgttccatacatcgttgtattcatgaacaaatgtgacatggttgacgatgaagaattactagaattagttgaaatggaaattcgtgatctattaactgaatatgaattccctggcgatgacattcctgtaatcaaaggttcagctcttaaagcacttcaaggtgaagctgactgggaagctaaaattgacgagttaatggaagctgtagattcttacattccaactccwgaacgtgatactgacaaaccattcatgatgccagttgaggatgtattctcaatcactggtcgtggaacagttgcaactggacgtgttgaacgtggacaagttaaagttggtgacgaagtagaagttatcggtatcgaagaagaaagcaaaaaagtagtagtaactggagtagaaatgttccgtaaattactagactacgctgaagctggcgacaacattggcgcacttctacgtggtgttgctcgtgaagatatccaacrtggtcaagtattagctaaaccaggttcgattactccacacactaacttcaaagctgaaacttatgttttaactaaagaagaaggtggacgtcacactccattcttcaacaactaccgcccacaattctatttccgtactactgacgtaactggtattgttacacttccagaaggtactgaaatggtaaygcctggtgataacattgagcttgcagttgaactaattgcaccaatcgctatcgaagac

SEQ ID NO: 1727 - DNA, 817 bp, Listeria seeligeri ATCC 35967
cggagctatcttagtagtatctgctgctgatggcccaatgccacaaactcgtgaacatatcttactttcacgtcaagttggtgttccatacatcgttgtattcatgaacaaatgtgacatggttgacgatgaagaattacttgaattagttgaaatggaaattcgtgatctattaactgaatatgaattccctggtgatgacattcctgtaatcaaaggttcagctcttaaagcacttcaaggtgaagctgactgggaagctaaaattgacgagttaatggaagctgtagattcttacattccaactccagaacgtgatactgacaaaccattcatgatgccagttgaggatgtattctcaatcactggtcgtggaactgttgcaactggacgtgttgaacgtggacaagttaaagttggtgacgaagtagaagttatcggtattgaagaagaaagcaaaaaagtaatagtaactggagtagaaatgttccgtaaattactagactacgctgaagctggcgacaacattggcgcacttctacgtggtgttgctcgtgaagatatccaacgtggtcaagtattagctaaaccaggttcgattactccacatactaacttcaaagctgaaacttatgttttaactaaagaagaaggtggacgtcacactccattcttcaacaactaccgcccacaattctatttccgtactactgacgtaactggtattgttacacttccagaaggtactgaaatggtaatgcctggtgataacattgagcttgcagttgaactaattgcaccaatcgctatcgaagac

SEQ ID NO: 1728 - DNA, 814 bp, Staphylococcus aureus ATCC 25923
cggtggtatcttagtagtatctgctgctgacggtccaatgccacaaactcgtgaacacattcttttatcacgtaacgttggtgtaccagcattagtagtattcttaaacaaagttgacatggttgacgatgaagaattattagaattagtagaaatggaagttcgtgacttattaagcgaatatgacttcccaggtgacgatgtacctgtaatcgctggttcagcattaraagctttagaaggcgatgctcaatacgaagaaaaaatcttagaattartggaagctgtagatacttacattccaactccagaacgtgattctgacaaaccattcatgatgccagttgaggacgtattctcaatcactggtcgtggtactgttgctacaggccgtgttgaacgtggtcaaatcaaagttggtgaagaagttgaaatcatcggtttacatgacacatctaaaacaactgttacaggtgttgaaatgttccgtaaattattagactacgctgaagctggtgacaacattggtgcattattacgtggtgttgctcgtgaagacgtacaacgtggtcaagtattagctgctcctggttcaattacaccacatactgaattcaaagcagaagtatacgtattatcaaaagacgaaggtggacgtcacactccattcttctcaaactatcgtccacaattctatttccgtactactgacgtaactggtgttgttcacttaccagaaggtactgaaatggtaatgcctggtgataacgttgaaatgacagtagaattaatcgctccaatcgcgattgaagac

SEQ ID NO: 1729 - DNA, 817 bp, Staphylococcus saprophyticus ATCC 15305
cggagctatcttagtagtatctgctgctgatggcccaatgccacaaactcgtgaacacattcttttatcacgtracgttggtgytccagcattagttgtattcttaaacaaagttgacatggttgacgaygaagaattattagaattrgtagaaatggaagttcgtgrcttattaagcgaatatgacttcccaggtgacgatgtacctgtaatctctggttctgcattaaaagctttagaaggcgacgctgactatgagcaaaaaatcttagacttaatgcaagctgttgatgactycattccaacaccagaacgtgattctgacaaaccattcatgatgccagttgaggacgtattctcaatcactggtcgtggtactgttgctacaggccgtgttgaacgtggtcaaatcaaagtcggtgaagaaatcgaratcatcggtatgcaagaagaatcaagcaaaacaactgttactggtgtagaaatgttccgtaaattattagactacgctgaagctggtgacaacattggtgcattattacgtggtgtttcacgtgatgatgtacaacgtggtcaagttttagctgctcctggtactatcacaccacatacaaaattcaaagcggatgtttacgttttatctaaagatgaaggtggtcgtcatacgccattcttcactaactaccgcccacaattctatttccgtactactgacgtaactggtgttgttaacttaccagaaggtactgaaatggttatgcctggcgataacgttgaaatggatgttgaattaatttctccaatcgctattgaagac

SEQ ID NO: 1730 - DNA, 817 bp, Staphylococcus simulans ATCC 27848
cggcggtatcttagtagtatctgctgcagatggtccaatgccacaaactcgtgaacacatcttattatcacgtaacgttggtgtaccagctttagttgtattcttaaacaaagctgacatggttgacgacgaagaattattagaattagttgaaatggaagttcgtgacttattatctgaatacgacttccctggtgacgatgtaccagttatcgttggttctgcattaaaagctttagaaggcgacccagaatacgaacaaaaaatcttagacttaatgcaagctgtagatgactacatcccaactccagaacgtgactctgataaaccattcatgatgccagttgaggacgtattctcaatcactggtcgtggtactgtagcaacaggccgtgttgaacgtggtcaaatcaaagtcggtgaagaagttgaaatcatcggtatcactgaagaaagcaagaaaacaacagttacaggtgtagaaatgttccgtaaattattagactacgctgaagctggtgacaacatcggtgctttattacgtggtgttgcacgtgaagacgtacaacgtggacaagtattagcagctcctggctctattactccacacacaaaattcaaagctgatgtttacgttttatctaaagaagaaggtggacgtcatactccattcttcactaactaccgcccacaattctacttccgtactactgacgtaactggcgttgttcacttaccagaaggtactgaaatggttatgcctggcgataacgtagaaatgactgttgaattgatcgctccaatcgcgattgaagac

SEQ ID NO: 1731 - DNA, 817 bp, Streptococcus agalactiae ATCC 27591
cggagctatccttgtagttgcttcaactgatggaccaatgccacaaactcgtgagcacatccttctttcacgtcaagttggtgttaaacaccttatcgtattcatgaacaaagttgaccttgttgatgatgaagaattgcttgaattggttgaaatggaaattcgtgaccttctttcagaatacgacttcccaggtgatgaccttccagttatccaaggttcagctcttaaagcacttgaaggcgacgaaaaatacgaagacatcatcatggaattgatgagcactgttgatgagtacattccagaaccagaacgtgatactgacaaacctttacttcttccagttgaagatgtattctcaatcactggacgtggtacagttgcttcaggacgtatcgaccgtggtactgttcgtgtcaacgacgaagttgaaatcgttggtattaaagaagatatccaaaaagcagttgttactggtgttgaaatgttccgtaaacaacttgacgaaggtcttgcaggggacaacgttggtgttcttcttcgtggtgttcaacgtgatgaaatcgaacgtggtcaagttcttgctaaaccaggttcaatcaacccacacactaaatttaaaggtgaagtttacatcctttctaaagaagaaggtggacgtcatactccattcttcaacaactaccgtccacaattctacttccgtacaactgacgtaacaggttcaatcgaacttccagcaggaacagaaatggttatgcctggtgataacgttactatcgaagttgaattgattcacccaatcgccgtagaacaa

SEQ ID NO: 1732 - DNA, 817 bp, Streptococcus pneumoniae ATCC 27336
cggagctatccttgtagtagcttcaactgacggaccaatgccacaaactcgtgagcacatccttctttcacgtcaggttggtgttaaacaccttatcgtcttcatgaacaaagttgacttggttgacgacgaagaattgcttgaattggttgaaatggaaatccgtgacctattgtcagaatacgacttcccaggtgacgatcttccagttatccaaggttcagcacttaaagctcttgaaggtgactctaaatacgaagacatcgttatggaattgatgaacacagttgatgagtatatcccagaaccagaacgtgacactgacaaaccattgcttcttccagtcgaggacgtattctcaatcactggacgtggtacagttgcttcaggacgtatcgaccgtggtatcgttaaagtcaacgacgaaatcgaaatcgttggtatcaaagaagaaactcraaaagcagttgttactggtgttgaaatgttccgtaaacaacttgacgaaggtcttgctggagataacgtaggtgtccttcttcgtggtgttcaacgtgatgaaatcgaacgtggacaagttatcgctaaaccaggttcaatcaacccacacactaaattcaaaggtgaagtctacatccttactaaagaagaaggtggacgtcacactccattcttcaacaactaccgtccacaattctacttccgtactactgacgttacaggttcaatcgaacttccagcaggtactgaaatggtaatgcctggtgataacgtgacaatcgacgttgagttgattcacccaatcgccgtagaacaa

SEQ ID NO: 1733 - DNA, 817 bp, Streptococcus salivarius ATCC 7073
cggtgcgatccttgtagtagcatctactgacggaccaatgccacaaactcgtgagcacatccttctttcacgtcaggttggtgttaaacaccttatcgtcttcatgaacaaagttgacttggttgacgatgaagaattgcttgaattggttgaaatggaaatccgtgaccttctttcagaatacgatttcccaggtgatgacattccagttatccaaggttcagctcttaaagctcttgaaggtgattctaaatacgaagacatcatcatggacttgatgaacactgttgacgaatacatcccagaaccagaacgtgacactgacaaaccattgttgcttccagtcgaagacgtattctcaatcactggtcgtggtactgttgcttcaggacgtatcgaccgtggtgttgttcgtgtcaatgacgaagttgaaatcgttggtcttaaagaagacatccaaaaagcagttgttactggtgttgaaatgttccgtaaacaacttgacgraggtattgccggagataacgtcggtgttcttcttcgtggtatccaacgtgatgaaatcgaacgtggtcaagtattggctgcacctggttcaatcaacccacacactaaattcaaaggtgaagtttacatcctttctaaagaagaaggtggacgtcacactccattcttcaacaactaccgtccacagttctacttccgtacaactgacgtaacaggttcaatcgaacttcctgcaggtactgaaatggttatgcctggtgataacgtgactatcgacgttgagttgatccacccaatcgccgttgaacaa

SEQ ID NO: 1734 - DNA, 897 bp, Agrobacterium tumefaciens
aacatgatcaccggtgctgccgagatggacggcgcgatcctggtttgctcggctgccgacggcccgatgccacagacccgcgagcacatcctgcttgcccgtcaggtgggcgttccggccatcgtcgtgttcctcaacaaggtcgaccaggttgacgacgccgagcttctcgagctcgtcgagcttgaagttcgcgaacttctgtcgtcctacgacttcccgggcgacgatatcccgatcatcaagggttcggcacttgctgctcttgaagattctgacaagaagatcggtgaagacgcgatccgcgagctgatggctgctgtcgacgcctacatcccgacgcctgagcgtccgatcgaccagccgttcctgatgccgatcgaagacgtgttctcgatctcgggtcgtggtacggttgtgacgggtcgcgttgagcgcggtatcgtcaaggttggtgaagaagtcgaaatcgtcggcatccgtccgacctcgaagacgactgttaccggcgttgaaatgttccgcaagctgctcgaccagggccaggccggcgacaacatcggtgcactcgttcgcggcgttacccgtgacggcgtcgagcgtggtcagatcctgtgcaagccgggttcggtcaagccgcacaagaagttcatggcagaagcctacatcctgacgaaggaagaaggcggccgtcatacgccgttcttcacgaactaccgtccgcagttctacttccgtacgactgacgttaccggtatcgtttcgcttcctgaaggcacggaaatggttatgcctggcgacaacgtcactgttgaagtcgagctgatcgttccgatcgcgatggaagaaaagctgcgcttcgctatccgcgaaggcggccgtaccgtcggcgccggc

SEQ ID NO: 1735 - DNA, 885 bp, Bacillus subtilis strain 168
atgatcactggtgctgcgcaaatggacggagctatccttgtagtatctgctgctgatggcccaatgccacaaactcgtgagcacatccttctttctaaaaacgttggtgtaccatacatcgttgtattcttaaacaaatgcgacatggtagacgacgaagagcttcttgaactagttgaaatggaagttcgcgatcttcttagcgaatacgacttccctggtgatgatgtaccagttgttaaaggttctgctcttaaagctcttgaaggagacgctgagtgggaagctaaaatcttcgaacttatggatgcggttgatgagtacatcccaactccagaacgcgacactgaaaaaccattcatgatgccagttgaggacgtattctcaatcactggtcgtggtacagttgctactggccgtgtagaacgcggacaagttaaagtcggtgacgaagttgaaatcatcggtcttcaagaagagaacaagaaaacaactgttacaggtgttgaaatgttccgtaagcttcttgattacgctgaagctggtgacaacattggtgcccttcttcgcggtgtatctcgtgaagaaatccaacgtggtcaagtacttgctaaaccaggtacaatcactccacacagcaaattcaaagctgaagtttacgttctttctaaagaagagggtggacgtcatactccattcttctctaactaccgtcctcagttctacttccgtacaactgacgtaactggtatcatccatcttccagaaggcgtagaaatggttatgcctggagataacactgaaatgaacgttgaacttatttctacaatcgctatcgaagaaggaactcgtttctctattcgtgaaggcggacgtactgttggt

SEQ ID NO: 1736 - DNA, 882 bp, Bacteroides fragilis DSM 2151
atggttactggtgctgctcagatggacggtgctatcattgtagttgctgctactgatggtccgatgcctcagactcgtgagcacatccttttggctcgtcaggtaaacgttccgaagctggttgtattcatgaacaagtgcgatatggttgaagatgctgagatgttggaacttgttgaaatggaaatgagagaattgctttcattctatgatttcgacggtgacaatactccgatcattcagggttctgctcttggtgcattgaacggcgtagaaaaatgggaagacaaagtaatggaactgatggaagctgttgatacttggattccactgcctccgcgcgatgttgataaacctttcttgatgccggtagaagacgtgttctctatcacaggtcgtggtactgtagctacaggtcgtatcgaaactggtgttatccatgtaggtgatgaaatcgaaatcctcggtttgggtgaagataagaaatcagttgtaacaggtgttgaaatgttccgcaaacttctggatcagggtgaagctggtgacaacgtaggtctgttgcttcgtggtgttgacaagaacgaaatcaaacgtggtatggttctttgtaaaccgggtcagattaaacctcactctaaattcaaagcagaggtttatatcctgaagaaagaagaaggtggtcgtcacactccattccataacaaatatcgtcctcagttctacctgcgtactatggactgtacaggtgaaatcactcttccggaaggaactgaaatggtaatgccgggtgataacgtaactatcactgtagagttgatctatccggttgcactgaacatcggtcttcgtttcgctatccgcgaaggtggacgtacagtaggt

SEQ ID NO: 1737 - DNA, 888 bp, Borrelia burgdorferi strain U78183
aatatgattacaggagcagctcaaatggatgcagcgatacttttagttgctgctgatagtggtgctgagcctcaaacaaaagagcatttgcttcttgctcaaagaatgggaataaagaaaataatagtttttttaaataaattggacttagcagatcctgaacttgttgagcttgttgaagttgaagttttagaacttgttgaaaaatatggcttttcagctgatactccaataatcaaaggttcagcttttggggctatgtcaaatccagaagatcctgaatctacaaaatgcgttaaagaacttcttgaatctatggataattattttgatcttccagaaagagatattgacaagccatttttgcttgctgttgaagatgtattttctatttcaggaagaggcactgttgctactgggcgtattgaaagaggtattattaaagttggtcaagaagttgaaatagttggaattaaagaaaccagaaaaactactgttactggtgttgaaatgttccagaaaattcttgagcaaggtcaagcaggggataatgttggtcttcttttgagaggcgttgataaaaaagacattgagagggggcaagttttgtcagctccaggtacaattactccacacaagaaatttaaagcttcaatttattgtttgactaaagaagaaggcggtaggcacaagccatttttcccagggtatagaccacagttcttttttagaacaaccgatgttactggagttgttgctttagagggcaaagaaatggttatgcctggtgataatgttgatattattgttgagctgatctcttcaatagctatggataagaatgtagaatttgctgttcgagaaggtggaagaaccgttgcttcagga

SEQ ID NO: 1738 - DNA, 894 bp, Brevibacterium linens DSM 20425
aacatgatcaccggtgccgctcagatggacggtgcgatcctcgtcgtcgccgctaccgacggaccgatgccccagacccgtgagcacgtgctgctcgcgcgtcaggtcggcgttccctacatcgtcgtggctctgaacaagtccgacatggtcgatgacgaggagctcctcgagctcgtcgaattcgaggtccgcgacctgctctcgagccaggacttcgacggagacaacgctccggtcattccggtgtccgctctcaaggcgctggaaggcgacgagaagtgggtcaagagcgttcaggatctcatggctgccgtcgatgacaacgttccggagccggagcgcgatgtcgacaagccgttcctcatgcccgtcgaggacgtcttcacgatcaccggtcgtggaaccgtcgtcaccggtcgtgtcgagcgcggcgtgctcctgcctaacgacgaaatcgaaatcgtcggcatcaaggagaagtcgtccaagacgactgtcaccgctatcgagatgttccgcaagaccctgccggatgcccgtgcaggtgagaacgtcggtctgctcctccgcggcaccaagcgcgaggatgttgagcgcggtcaggtcatcgtgaagccgggttcgatcaccccgcacaccaagttcgaggctcaggtctacatcctgagcaaggacgagggcggacgtcacaacccgttctactcgaactaccgtccgcagttctacttccggaccacggacgtcaccggtgtcatcacgctgcccgagggcaccgagatggtcatgcccggcgacaacaccgatatgtcggtcgagctcatccagccgatcgctatggaggaccgcctccgcttcgcaatccgcgaaggtggccgcaccgtcggcgccggt

SEQ ID NO: 1739 - DNA, 888 bp, Chlamydia trachomatis strain F/IC-Cal-13
atgatcacgggcgcagcgcagatggacggcgcgatcctggtttgctcggcagcagacggcccgatgccgcaaacgcgtgagcacatcctgctggcgcgtcaggttggtgttccgtacatcatcgtgttcctgaacaagtgcgacagtgtggacgacgctgaactgctcgagctggtcgagatggaagttcgcgaactcctgtcgaagtacgacttcccgggcgacgacacgccgatcgtgaagggttcggccaagctggcgctggaaggcgacacgggcgagctgggcgaagtggcgatcatgagcctggcagacgcgctggacacgtacatcccgacgccggagcgtgcagttgacggcgcgttcctgatgccggtggaagacgtgttctcgatctcgggccgtggtacggtggtgacgggtcgtgtcgagcgcggcatcgtgaaggtcggcgaagaaatcgaaatcgtcggtatcaagccgacggtgaagacgacctgcacgggcgttgaaatgttccgcaagctgctggaccaaggtcaggcaggcgacaacgtcggtatcctgctgcgcggcacgaagcgtgaagacgtggagcgtggccaggttctggcgaagccgggttcgatcacgccgcacacgcacttcacggctgaagtgtacgtgctgagcaaggacgaaggcggccgtcacacgccgttcttcaacaactaccgtccgcagttctacttccgtacgacggacgtgacgggctcgatcgagctgccgaaggacaaggaaatggtgatgccgggcgacaacgtgtcgatcacggtgaagctgattgctccgatcgcgatggaagaaggtctgcgcttcgcaatccgtgaaggcggccgtacggtcggc

SEQ ID NO: 1740 - DNA, 891 bp, Fibrobacter succinogenes strain S85
aacatggtgactggtgctgctcagatggacggcgctatcctcgttgttgccgctactgacggtccgatgccgcagactcgcgaacacatccttctcgctcaccaggttggcgtgccgaagatcgtcgtgttcatgaacaagtgcgacatggttgacgatgctgaaattctcgacctcgtcgaaatggaagttcgcgaactcctctccaagtatgacttcgacggtgacaacaccccgatcatccgtggttccgctctcaaggccctcgaaggcgatccggaataccaggacaaggtcatggaactcatgaacgcttgcgacgaatacatcccgctcccgcagcgcgataccgacaagccgttcctcatgccgatcgaagacgtgttcacgattactggccgcggcactgtcgctactggccgtatcgaacgcggtgtcgttcgcttgaacgacaaggttgaacgtatcggtctcggtgaaaccaccgaatacgtcatcaccggtgttgaaatgttccgtaagctcctcgacgacgctcaggcaggtgacaacgttggtctcctcctccgtggtgctgaaaagaaggacatcgtccgtggcatggttctcgcagctccgaagtctgtcactccgcacaccgaatttaaggctgaaatctacgttctcacgaaggacgaaggtggccgtcacacgccgttcatgaatggctaccgtccgcagttctacttccgcaccaccgacgttactggtacgatccagctcccggaaggtgtcgaaatggttactccgggtgacacggtcacgatccacgtgaacctcatcgctccgatcgctatggaaaagcagctccgcttcgctatccgtgaaggtggacgtactgttggtgctggc

SEQ ID NO: 1741 - DNA, 894 bp, Flavobacterium ferrugineum DSM 13524
aacatgatcaccggtgctgcccagatggacggtgctatcttagttgtggctgcatcagacggtcctatgcctcaaacaaaagaacacatcctgcttgctgcccaggtaggtgtacctaaaatggttgtgtttctgaataaagttgacctcgttgacgacgaagagctcctggagctggttgagatcgaggttcgcgaagaactgactaaacgcggtttcgacggcgacaacactccaatcatcaaaggttccgctacaggcgccctcgctggtgaagaaaagtgggttaaagaaattgaaaacctgatggacgctgttgacagctacatcccactgcctcctcgtccggttgatctgccgttcctgatgagcgtagaggacgtattctctatcactggtcgtggtactgttgctaccggtcgtatcgagcgtggccgtatcaaagttggtgagcctgttgagatcgtaggtctgcaggagtctcccctgaactctaccgttacaggtgttgagatgttccgcaaactcctcgacgaaggtgaagctggtgataacgccggtctcctcctccgtggtgttgaaaaaacacagatccgtcgcggtatggtaatcgttaaacccggttccatcactccgcacacggacttcaaaggcgaagtttacgtactgagcaaagacgaaggtggccgtcacactccattcttcaacaaataccgtcctcaattctacttccgtacaactgacgttacaggtgaagtagaactgaacgcaggaacagaaatggttatgcctggtgataacaccaacctgaccgttaaactgatccaaccgatcgctatggaaaaaggtctgaaattcgcgatccgcgaaggtggccgtaccgtaggtgcagga

SEQ ID NO: 1742 - DNA, 906 bp, Helicobacter pylori strain 26695
aacatgatcaccggtgcggcgcaaatggacggagcgattttggttgtttctgcagctgatggccctatgcctcaaactagggagcatatcttattgtctcgtcaagtaggcgtgcctcacatcgttgttttcttaaacaaacaagacatggtagatgaccaagaattgttagaacttgtagaaatggaagtgcgcgaattgttgagcgcgtatgaatttcctggcgatgacactcctatcgtagcgggttcagctttaagagctttagaagaagcaaaggctggtaatgtgggtgaatggggtgaaaaagtgcttaaacttatggctgaagtggatgcctatatccctactccagaaagagacactgaaaaaactttcttgatgccggttgaagatgtgttctctattgcgggtagagggactgtggttacaggtaggattgaaagaggcgtggtgaaagtaggcgatgaagtggaaatcgttggtatcagacctacacaaaaaacgactgtaaccggtgtagaaatgtttaggaaagagttggaaaaaggtgaagccggcgataatgtgggcgtgcttttgagaggaactaaaaaagaagaagtggaacgcggtatggttctatgcaaaccaggttctatcactccgcacaagaaatttgagggagaaatttatgtcctttctaaagaagaaggcgggagacacactccattcttcaccaattaccgcccgcaattctatgtgcgcacaactgatgtgactggctctatcacccttcctgaaggcgtagaaatggttatgcctggcgataatgtgaaaatcactgtagagttgattagccctgttgcgttagagttgggaactaaatttgcgattcgtgaaggcggtaggaccgttggtgctggt

SEQ ID NO: 1743 - DNA, 891 bp, Micrococcus luteus strain IFO 3333
aacatgatcaccggcgccgctcagatggacggcgcgatcctcgtggtcgccgctaccgacggcccgatggcccagacccgtgagcacgtgctcctggcccgccaggtcggcgtgccggccctgctcgtggccctgaacaagtcggacatggtggaggacgaggagctcctcgagcgtgtcgagatggaggtccggcagctgctgtcctccaggagcttcgacgtcgacgaggccccggtcatccgcacctccgctctgaaggccctcgagggcgacccccagtgggtcaagtccgtcgaggacctcatggatgccgtggacgagtacatcccggacccggtgcgcgacaaggacaagccgttcctgatgccgatcgaggacgtcttcacgatcaccggccgtggcaccgtggtgaccggtcgcgccgagcgcggcaccctgaagatcaactccgaggtcgagatcgtcggcatccgcgacgtgcagaagaccactgtcaccggcatcgagatgttccacaagcagctcgacgaggcctgggccggcgagaactgcggtctgctcgtgcgcggtctgaagcgcgacgacgtcgagcgcggccaggtgctggtggagccgggctccatcaccccgcacaccaacttcgaggcgaacgtctacatcctgtccaaggacgagggtgggcgtcacaccccgttctactcgaactaccgcgcgcagttctacttccgcaccaccgacgtcaccggcgtcatcacgctgcccgagggcaccgagatggtcatgcccggcgacaccaccgagatgtcggtcgagctcatccagccgatcgccatggaggagggcctcggcttcgccatccgcgagggtggccgcaccgtgggctccggc

SEQ ID NO: 1744 - DNA, 891 bp, Mycobacterium tuberculosis strain Erdmann
aacatgatcaccggcgccgcgcagatggacggtgcgatcctggtggtcgccgccaccgacggcccgatgccccagacccgcgagcacgttctgctggcgcgtcaagtgggtgtgccctacatcctggtagcgctgaacaaggccgacgcagtggacgacgaggagctgctcgaactcgtcgagatggaggtccgcgagctgctggctgcccaggaattcgacgaggacgccccggttgtgcgggtctcggcgctcaaggcgctcgagggtgacgcgaagtgggttgcctctgtcgaggaactgatgaacgcggtcgacgagtcgattccggacccggtccgcgagaccgacaagccgttcctgatgccggtcgaggacgtcttcaccattaccggccgcggaaccgtggtcaccggacgtgtggagcgcggcgtgatcaacgtgaacgaggaagttgagatcgtcggcattcgcccatcgaccaccaagaccaccgtcaccggtgtggagatgttccgcaagctgctcgaccagggccaggcgggcgacaacgttggtttgctgctgcggggcgtcaagcgcgaggacgtcgagcgtggccaggttgtcaccaagcccggcaccaccacgccgcacaccgagttcgaaggccaggtctacatcctgtccaaggacgagggcggccggcacacgccgttcttcaacaactaccgtccgcagttctacttccgcaccaccgacgtgaccggtgtggtgacactgccggagggcaccgagatggtgatgcccggtgacaacaccaacatctcggtgaagttgatccagcccgtcgccatggacgaaggtctgcgtttcgcgatccgcgagggtggccgcaccgtgggcgccggc

SEQ ID NO: 1745 - DNA, 891 bp, Mycoplasma genitalium strain G37
aatatgatcacaggtgctgcacaaatggatggagctattctagttgtttcagcaactgatagtgtgatgccccaaacccgcgagcacatcttacttgcccgccaagtaggggttcctaaaatggtagtttttctaaacaagtgtgatattgctagtgatgaagaggtacaagaacttgttgctgaagaagtacgtgatctgttaacttcctatggttttgatggtaagaacactcctattatttatggctcagctttaaaagcattggaaggtgatccaaagtgggaggctaagatccatgatttgattaaagcagttgatgaatggattccaactcctacacgtgaagtagataaacctttcttattagcaattgaagatacgatgaccattactggtagaggtacagttgttacaggaagagttgaaagaggtgaactcaaagtaggtcaagaagttgaaattgttggtttaaaaccaattagaaaagcagttgttactggaattgaaatgttcaaaaaggaacttgattcagcaatggctggtgacaatgctggggtattattacgtggtgttgaacgtaaagaagttgaaagaggtcaagttttagcaaaaccaggctctattaaaccgcacaagaaatttaaagctgagatctatgctttaaagaaagaagaaggtggtagacacactggttttttaaacggttaccgtcctcaattctatttccgtaccactgatgtaactggttctattgctttagctgaaaatactgaaatggttctacctggtgataatgcttctattactgttgagttaattgctcctatcgcttgtgaaaaaggtagtaagttctcaattcgtgaaggtggtagaactgtaggggcaggc

SEQ ID NO: 1746 - DNA, 891 bp, Neisseria gonorrhoeae strain MS11
aacatgattaccggcgccgcacaaatggacggtgcaatcctggtatgttctgctgccgacggccctatgccgcaaacccgcgaacacatcctgctggcccgtcaagtaggcgtaccttacatcatcgtgttcatgaacaaatgcgacatggtcgacgatgccgagctgttccaactggttgaaatggaaatccgcgacctgctgtccagctacgacttccccggcgacgactgcccgatcgtacaaggttccgcactgaaagccttggaaggcgatgccgcttacgaagaaaaaatcttcgaactggctaccgcattggacagatacatcccgactcccgagcgtgccgtggacaaaccattcctgctgcctatcgaagacgtgttctccatttccggccgcggtaccgtagtcaccggccgtgtagagcgaggtatcatccacgttggtgacgagattgaaatcgtcggtctgaaagaaacccaaaaaaccacctgtaccggcgttgaaatgttccgcaaactgctggacgaaggtcaggcgggcgacaacgtaggcgtattgctgcgcggtaccaaacgtgaagacgtagaacgcggtcaggtattggccaaacggggtactatcactcctcacaccaagttcaaagcagaagtgtacgtattgagcaaagaagagggcggcccccataccccgtttttcgccaactaccgtccccaattctacttccgtaccactgacgtaaccggcacgattactttggaaaaaggtgtggaaatggtaatgccgggtgagaacgtaaccattactgtagaactgattgcgcctatcgctatggaagaaggtctgcgctttgcgattcgcgaaggcggccgtaccgtgggtgccggc

SEQ ID NO: 1747 - DNA, 891 bp, Rickettsia prowazekii strain Madrid E
aatatgataactggtgccgctcagatggatggtgctatattagtagtttctgctgctgatggtcctatgcctcaaactagagaacatatattactggcaaaacaggtaggtgtacctgctatggtagtatttttgaataaagtagatatggtagatgatcctgacctattagaattagttgagatggaagtaagagaattattatcaaaatatggtttccctggtaatgaaatacctattattaaaggttctgcacttcaagctttagaaggaaaacctgaaggtgaaaaagctattaatgagttaatgaatgcagtagatacgtatatacctcagcctatagagctacaagataaaccttttttaatgccaatagaggatgtattttctatttcaggcagaggtaccgttgtaactggtagagtggagtcaggcataattaaggtgggtgaagaaattgaaatagtaggtctaaaaaatacgcaaaaaacgacttgtacaggtgtagaaatgttcagaaaattacttgatgaaggacaatctggagataatgtcggtatattactacgtggtacaaaaagagaagaagtagaaagaggacaagtacttgcaaaacctgggagcataaaaccgcatgataaatttgaagctgaagtgtatgtgcttagtaaagaggaaggtggacgtcataccccatttactaatgattatcgcccacagttctattttagaacaacagatgttaccggcacaataaaattgccttctgataagcagatggttatgcctggagataatgctactttttcagtagaattaattaagccgattgctatgcaagaagggttaaaattctctatacgtgaaggtggtagaacagtaggagccggt

SEQ ID NO: 1748 - DNA, 891 bp, Salmonella choleraesuis subsp. choleraesuis strain LT2 trpE9
aacatgatcaccggtgctgctcagatggacggcgcgatcctggttgttgctgcgactgacggcccgatgccgcagacccgtgagcacatcctgctgggtcgtcaggtaggcgttccgtacatcatcgtgttcctgaacaaatgcgacatggttgatgacgaagagctgctggaactggttgagatggaagttcgcgaactgctgtctcagtacgacttcccgggcgacgacactccgatcgttcgtggttctgctctgaaagcgctggaaggcgacgcagagtgggaagcgaaaatcatcgaactggctggcttcctggattcttatattccggaaccagagcgtgcgattgacaagccgttcctgctgccgatcgaagacgtattctccatctccggtcgtggtaccgttgttaccggtcgtgtagagcgcggtatcatcaaagtgggcgaagaagttgaaatcgttggtatcaaagagactcagaagtctacctgtactggcgttgaaatgttccgcaaactgctggacgaaggccgtgccggtgagaacgtaggtgttctgctgcgtggtatcaaacgtgaagaaatcgaacgtggtcaggtactggctaagccgggcaccatcaagccgcacaccaagttcgaatctgaagtgtacattctgtccaaagatgaaggcggccgtcatactccgttcttcaaaggctaccgtccgcagttctacttccgtactactgacgtgactggtaccatcgaactgccggaaggcgtagagatggtaatgccgggcgacaacatcaaaatggttgttaccctgatccacccgatcgcgatggacgacggtctgcgtttcgcaatccgtgaaggcggccgtaccgttggcgcgggc

SEQ ID NO: 1749 - DNA, 881 bp, Shewanella putrefaciens DSM 50426
atgatcactggtgctgcacagatggacggcgcgattctggtagtcgcttcaacagacggtccaatgccacagactcgtgagcacatcctgctttctcgtcaggttggcgtaccattcatcatcgtattcatgaacaaatgtgacatggtagatgacgaagagctgttagagctagttgagatggaagtgcgtgaactgttatcagaatacgatttcccaggtgatgacttaccggtaatccaaggttcagctctgaaagcgctagaaggcgagccagagtgggaagcaaaaatccttgaattagcagcggcgctggattcttacattccagaaccacaacgtgacatcgataagccgttcctactgccaatcgaagacgtattctcaatttcaggccgtggtacagtagtaacaggtcgtgttgagcgtggtattgtacgcgtaggcgacgaagttgaaatcgttggtgtacgtgcgacaactaagacaacgtgtactggtgtagaaatgttccgtaaactgcttgacgaaggtcgtgcaggtgagaactgtggtattttgttacgtggtactaagcgtgatgacgtagaacgtggtcaagtattagcgaagccaggttcaatcaacccacacactacttttgaatcagaagtttacgtactgtcaaaagaagaaggtggtcgtcacacgccattcttcaaaggctaccgtccacagttctacttccgtacaactgacgtaaccggtactatcgaactgccagaaggcgtagagatggtaatgccaggcgataacatcaagatggtagtgacactgatttgcccaatcgcgatggacgaaggtttacgcttcgcaatccgtgaaggcggtcgtacagtggt

SEQ ID NO: 1750 - DNA, 897 bp, Stigmatella aurantiaca strain DW4
aacatgatcacgggcgcggcgcagatggacggagcgattctggtggtgtccgcggccgacggcccgatgccccagacgcgtgagcacatcctgctggccaggcaggtgggcgtgccctacatcgtcgtcttcctgaacaaggtggacatgctggacgatccggagctgcgcgagctggtggagatggaggtgcgcgacctgctcaagaagtacgagttcccgggcgacagcatccccatcatccctggcagcgcgctcaaggcgctggagggagacaccagcgacatcggcgagggagcgatcctgaagctgatggcggcggtggacgagtacatcccgacgccgcagcgtgcgacggacaagccgttcctgatgccggtggaagacgtgttctccatcgcaggccgaggaacggtggcgacgggccgagtggagcgcggcaagatcaaggtgggcgaggaagtggagatcgtggggatccgtccgacgcagaagacggtcatcacgggggtggagatgttccgcaagctgctggacgagggcatggcgggagacaacatcggagcgctgctgcgaggcctgaagcgcgaggacctggagcgtgggcaggtgctggcgaactgggggagcatcaacccgcacacgaagttcaaggcgcaggtgtacgtgctgtcgaaggaagagggagggcggcacacgccgttcttcaagggataccggccgcagttctacttccggacgacggacgtgaccggaacggtgaagctgccggacaacgtggagatggtgatgccgggagacaacatcgccatcgaggtggagctcattactccggtcgccatggagaaggagctgccgttcgccatccgtgagggtggccgcacggtgggcgccggc

SEQ ID NO: 1751 - DNA, 897 bp, Thiomonas cuprina strain Hoe5
aacatgatcaccggtgcggcccagatggacggcgccatcctggtcgtgtccgccgccgacggccccatgccccaaacccgcgagcacatcctgctggcgcgtcaggtgggcgtgccctacatcatcgtgttcctcaacaagtgcgacatggtcgacgacgccgagctgctcgaactcgtcgagatggaagtgcgcgagctgctgtccaagtacgacttccccggtgacgacacccccatcatcaagggctcggccaagctggccctcgaaggcgacaagggcgaactgggcgaaggcgccattctcaagctggccgaggccctggacacctacatccccacgcccgagcgggccgtcgacggcgcgttcctcatgcccgtggaagacgtgttctccatctccgggcgcggcacggtggtcaccgggcgtgtggagcgcggcatcatcaaggtcggcgaggaaatcgagattgtcggcctcaagcccaccctcaagaccacctgcaccggcgtggaaatgttcaggaagctgctcgaccagggccaggccggcgacaacgtcggcatcttgctgcgcggcaccaagcgcgaggaagtcgagcgcggccaggtgctgtgcaaacccggctcgatcaagccccacacccacttcaccgccgaggtgtacgtgctgagcaaggacgagggcggccgccacacccccttcttcaacaactaccgcccgcagttctacttccgcaccaccgacgtcaccggcgccatcgaactgcccaaggacaaggaaatggtcatgcccggcgataatgtgagcatcaccgtcaagctcatcgcccccatcgccatggaagaaggcctgcgcttcgccatccgcgaaggcggccgcaccgtcggcgccggc

SEQ ID NO: 1752 - DNA, 894 bp, Treponema pallidum strain Nichols
aatatgatcacgggtgctgcgcagatggacggtggtattctcgtcgtgtctgcgcctgacggcgttatgccacagacgaaggagcatcttctgctcgcccgtcaggttggtgttccctccatcattgtttttttgaacaaggttgatttggttgatgatcctgagttgctagagctggtggaagaagaggtgcgtgatgcgcttgctggatatgggttttcgcgtgagacgcctatcgtcaaggggtctgcgtttaaagctctgcaggatggcgcttccccggaggatgcagcttgtattgaggaactgcttgcggccatggattcctactttgaagacccagtgcgtgacgacgcaagacctttcttgctctctatcgaggatgtgtacactatttctgggcgtggtaccgttgtcacggggcgcatcgaatgtggggtaattagtctgaatgaagaggtcgagatcgtcgggattaagcccactaagaaaacagtggttactggcattgagatgtttaataagttgcttgatcagggaattgcaggtgataacgtggggctgcttttgcgcggggtggataaaaaagaggttgagcgcggtcaggtgctttctaagcccggttctattaagccacacaccaagtttgaggcgcagatctacgtgctctctaaggaagagggtggccgtcacagtcctttttttcaaggttatcgtccgcagttttattttagaactactgacattaccggtacgatttctcttcctgaaggggtagacatggtgaagccgggggataacaccaagattataggtgagctcatccacccgatagctatggacaagggtctgaagcttgcgattcgtgaaggggggcgcactattgcttctggt

SEQ ID NO: 1753 - DNA, 891 bp, Ureaplasma urealyticum ATCC 33697
aatatgattacaggggcagcacaaatggatggagcaattttagttattgctgcatctgatggggttatggctcaaactaaagaacatattttattagcacgtcaagttggtgttccaaaaatcgttgttttcttaaacaaatgtgatttcatgacagatccagatatgcaagatcttgttgaaatggaagttcgtgaattattatctaaatatggatttgatggcgataacacaccagttattcgtggttcaggtcttaaggctttagaaggagatccagtttgagaagcaaaaattgatgaattaatggacgcagttgattcatgaattccattaccagaacgtagtactgacaaaccattcttattagcaattgaagatgtattcacaatttcaggacgtggtacagtagtaactggacgtgttgaacgtggtgtattaaaagttaatgatgaggttgaaattgttggtctaaaagacactcaaaaaactgttgttacaggaattgaaatgtttagaaaatcattagatcaagctgaagctggtgataatgctggtattttattacgtggtattaaaaaagaagatgttgaacgtggtcaagtacttgtaaaaccaggatcaattaaacctcaccgtacttttactgctaaagtttatattcttaaaaaagaagaaggtggacgtcatacacctattgtttcaggataccgtccacaattctattttagaacaacagatgtaacaggtgctatttcattacctgctggtgttgatttggttatgccaggtgatgacgttgaaatgactgtagaattaattgctccagttgcgattgaagatggatctaaattctcaatccgtgaaggtggtaaaactgtaggtcatggt

SEQ ID NO: 1754 - DNA, 909 bp, Wolinella succinogenes DSM 1740
aacatgattacaggtgctgctcaaatggatggcgcgattcttgttgtttctgcggcggatggccccatgccccaaactagggagcacattcttctttctcgacaagtaggcgttccttacatcgtggttttcttgaacaaagaagatatggttgatgacgctgagcttcttgagcttgttgaaatggaagttagagaacttcttagcaactacgacttccctggagatgacactcctatcgttgcaggttccgctcttaaagctcttgaagaggctaacgaccaggaaaatgttggcgagtggggcgagaaagtattgaagcttatggctgaggttgaccgatatattcctacgcctgagcgagatgtggataagcctttccttatgcctgttgaagacgtattctccatcgcgggtcgtggaaccgttgtgacaggaagaattgaaagaggcgtggttaaagtcggtgacgaagtagaaatcgttggtatccgaaacacacaaaaaacaaccgtaactggcgttgagatgttccgaaaagagctcgacaagggtgaggcgggtgacaacgttggtgttcttttgagaggcaccaagaaagaagatgttgagagaggtatggttctttgtaaaataggttctatcactcctcacactaactttgaaggtgaagtttacgttctttccaaagaggaaggcggacgacacactccattcttcaatggataccgacctcagttctatgttagaactacagacgttaccggttctatctctcttcctgagggcgtagagatggttatgcctggtgacaacgttaagatcaatgttgagcttatcgctcctgtagccctcgaagagggaacacgattcgcgatccgtgaaggtggtcgaaccgttggtgcgggt

SEQ ID NO: 1755 - DNA, 888 bp, Burkholderia cepacia; identical to SEQ ID NO: 1739

SEQ ID NO: 1756 - DNA, 388 bp, Bacillus anthracis strain CIP 9444
tgaaagttcaggtaaaacaacagtttcattacacgcaattgcagaagtacagcgtcaaggtggacaagcagcgttcattgatgctgagcatgcaatggatcctgtatatgcacaaaaactaggtgttaacatcgatgaattactattatcacaacctgatacaggggagcaaggtttagaaatcgcagaagcacttgtacgaagtggtgcggttgatattatcgtaattgactctgtagcagctcttgtaccgaaagctgaaattgaaggagacatgggtgactcacacgtaggtttacaagctcgtctaatgtctcaagcacttcgtaaactttcaggtgcaatcaataaatcaaaaacaatcgcaatctttattaaccaaattcgt

SEQ ID NO: 1757 - DNA, 388 bp, Bacillus anthracis ATCC 4229; identical to SEQ ID NO: 1756

SEQ ID NO: 1758 - DNA, 388 bp, Bacillus cereus ATCC 7064; identical to SEQ ID NO: 1756

SEQ ID NO: 1759 - DNA, 388 bp, Bacillus cereus ATCC 13472
tgaaagttcaggtaaaacgacagtttcattacatgcaattgcagaagtacaacgtcaaggtggacaagcagcattcatcgatgcggagcacgcaatggatcctgtatatgcacaaaaattaggcgttaacatagatgaattactattatcacagcctgatacaggggagcaaggattagaaatcgcggaagcacttgtacgaagtggtgcggttgacattatcgtaattgactctgtagcagctcttgtaccgaaagcagagattgaaggtgacatgggtgactcacacgtaggtttacaagcacgtttaatgtcacaagcacttcgtaagctttcaggagcaatcaacaaatcaaaaacaattgcaatctttattaaccaaattcgt

SEQ ID NO: 1760 - DNA, 374 bp, Bacillus mycoides ATCC 6462
aaacgacagtttcattacatgcaattgcagaagtacaacgtcaaggtggacaagcagcattcatcgatgcggagcacgcaatggatcctgtatatgcacaaaaattaggcgttaacatagatgaattactattatcacagcctgatacaggggagcaaggattagaaatcgcagaagcacttgtacgaagtggtgcggttgacattatcgtaattgactctgtagcagctcttgtaccgaaagcagagattgaaggagacatgggtgactcacacgtaggtttacaagcacgtttaatgtcacaagcacttcgtaagctttcaggagcaatcaacaaatcaaaaacaattgcaatctttattaaccaaattcgt

SEQ ID NO: 1761 - DNA, 381 bp, Bacillus pseudomycoides NRRL BD-10
ggaaagttcaggtaaaacaacggtttccttacatgcgattgcagaagtgcaacgtcaaggtggacaagcggcatttattgatgcggagcatgcgatggatcctgtatatgcacaaaagttaggtgttaatattgatgagttactattatcgcagcctgatacaggagaacaaggtttagaaatcgcagaagcattagtacgaagcggtgcgattgatatcattgtaattgactctgtagcagctcttgtaccaaaagcagaaatcgaaggggaaatgggtgactcccacgttggtttacaagcgcgtttaatgtcacaagcacttcgtaagctttctggtgcgattaacaaatcaaaaacaattgcaatcttcattaacca

SEQ ID NO: 1762 - DNA, 388 bp, Bacillus thuringiensis strain HER 1410
tgaaagttcaggtaaaacgacagtttcattacatgcaattgcagaagtacaacgtcaaggtggacaagcagcattcatcgatgcggagcacgcaatggatcctgtatatgcacaaaaattaggcgttaacatagatgaattactattatcacagcctgatacaggggagcaaggattagaaatcgcggaagcacttgtacgaagtggtgcggttgacattatcgtaattgactctgtagcagctcttgtaccgaaagcagagattgaaggcgacatgggtgactcacacgtaggtttacaagcacgtttaatgtcacaagcacttcgtaagctttcaggagcaatcaacaaatcaaaaacaattgcaatctttattaaccaaattcgt

SEQ ID NO: 1763 - DNA, 388 bp, Bacillus thuringiensis strain HER 1418
tgaaagttcaggtaaaacgacagtttcattacatgcaattgcagaagtacaacgtcaaggtggacaagcagcattcattgatgcggagcacgcaatggatcctgtatatgcacaaaaattaggcgttaacatagatgaattactattatcacagcctgatacaggggagcaaggattggaaatcgcggaagcacttgtacgaagtggtgcggttgacattatcgtaattgactctgtagcagctcttgtaccgaaagcagagattgaaggcgatatgggtgactcacacgtaggtttacaagcacgtttaatgtcacaagcacttcgtaagctttcaggagcaatcaacaaatcaaaaacaattgcaatctttattaaccaaattcgt

SEQ ID NO: 1764 - DNA, 358 bp, Klebsiella oxytoca ATCC 33496
ctcctatctggattatgcgatgtcggtcattgttggccgtgcgctgccggatgtccgagatggcctgaagccggtacaccgtcgcgtactatacgccatgaacgtattgggcaatgactggaacaaagcctataaaaaatctgcccgtgtcgtgggtgacgtcatcggtaaataccaccctcatggtgatactgccgtatacgacaccattgtacgtatggcgcagcccttctccctgcgttacatgctggtagatggccagggtaactttggttcggtcgacggcgactccgccgcagcgatgcgttatacggaaatccgtatgtcgaagatcgcccatgaactgatggccgacctc

SEQ ID NO: 1765 - DNA, 365 bp, Klebsiella pneumoniae subsp. ozaenae ATCC 11296
ttaagaactcttatctggattatgcgatgtcggtcattgttggccgtgcgctgccggatgtccgagatggcctgaagccggtacaccgtcgcgtactttacgccatgaacgtattgggcaatgactggaacaaagcctataaaaaatcagcccgtgtcgttggtgacgtaatcggtaaataccacccgcacggcgactccgcggtatacgacaccatcgtgcgtatggcgcagccgttctcgctgcgttacatgctggtggacggccagggtaactttggttccatcgacggcgactccgccgcggcgatgcgttataccgaaattcgtctggcgaaaatcgctcatgagctgatggccgatctt

SEQ ID NO: 1766 - DNA, 344 bp, Klebsiella planticola ATCC 33531
aagagctcgtatctggattatgcgatgtcggtcattgttggccgtgcgctgccggatgtccgagatggcctgaaaccggtacaccgtcgcgtactttacgccatgaacgtattgggcaatgactggaacaaagcctataaaaaatccgcccgtgtcgttggtgacgtaatcggtaaataccaccctcatggtgataccgccgtttatgacaccattgtacgtatggcacagccattctccttgcgttatatgctggtcgatggccagggtaacttcggttctgtcgatggcgactccgccgcagcgatgcgttatacggaaatccgtatgtcgaaaatcgccca

SEQ ID NO: 1767 - DNA, 345 bp, Klebsiella pneumoniae ATCC 27336
aactcttatctggattatgcgatgtcggtcattgttggccgtgcgctgccggatgtccgagatggcctgaagccggtacaccgtcgcgtactttacgccatgaacgtattgggcaatgactggaacaaagcctataaaaaatcagcccgtgtcgttggtgacgtaatcggtaaataccacccgcacggcgactccgcggtatacgacaccatcgtgcgtatggcgcagccgttctcgctgcgttacatgctggtggacggccagggtaactttggttccatcgacggcgactccgccgcggcgatgcgttataccgaaattcgtctggcgaaaatcgctcatgag

SEQ ID NO: 1768 - DNA, 356 bp, Klebsiella pneumoniae subsp. pneumoniae ATCC 13883
cttatctggattatgcgatgtcggtcattgttggccgtgcgctgccggatgtccgagatggcctgaagccggtacaccgtcgcgtactttacgccatgaacgtattgggcaatgactggaacaaagcctataaaaaatcagcccgtgtcgttggtgacgtaatcggtaaataccacccgcacggcgactccgcggtatacgacaccatcgtgcgtatggcgcagccgttctcgctgcgttacatgctggtggacggccagggtaactttggttccatcgacggcgactccgccgcggcgatgcgttataccgaaattcgtctggcgaaaatcgctcatgagctgatggccgatctt

SEQ ID NO: 1769 - DNA, 361 bp, Klebsiella pneumoniae subsp. pneumoniae ATCC 29011
taagaactcttatctggattatgcgatgtcggtcattgttggccgtgcgctgccggatgtccgagatggcctgaagccggtacaccgtcgcgtactttacgccatgaacgtattgggcaatgactggaacaaagcctataaaaaatcagcccgtgtcgttggtgacgtaatcggtaaataccacccgcacggcgactccgcggtatacgacaccatcgtgcgtatggcgcagccgttctcgctgcgttacatgctggtggacggccagggtaactttggttccatcgacggcgactccgccgcggcgatgcgttataccgaaattcgtctggcgaaaatcgctcatgagctgatggccgat

SEQ ID NO: 1770 - DNA, 365 bp, Klebsiella pneumoniae subsp. rhinoscleromatis ATCC 13824
taagaactcttatctggattatgcgatgtcggtcattgttggccgtgcgctgccggatgtccgagatggcctgaagccggtacaccgtcgcgtactttacgccatgaacgtattgggcaatgactggaacaaagcctataaaaaatcagcccgtgtcgttggtgacgtaatcggtaaataccacccgcacggcgactccgcggtatacgacaccatcgtgcgtatggcgcagccgttctcgctgcgttacatgctggtggacggccagggtaactttggttccatcgacggcgattccgccgcggcgatgcgttataccgaaattcgtctggcgaaaatcgctcatgagctgatggccgatcttg

SEQ ID NO: 1771 - DNA, 357 bp, Klebsiella terrigena ATCC 33257
tcgtatctggattatgcgatgtcggtcattgttggccgtgcgctgccggatgtccgagatgggttgaaaccggtacaccgtcgcgtactttacgccatgaacgtattgggcaatgactggaacaaagcctataaaaaatccgcccgtgtcgttggtgacgtaatcggtaaatatcaccctcacggtgataccgccgtttatgacaccattgtacgtatggcgcagccattctccttgcgttatatgctggtcgatggccagggtaacttcggttctgtcgatggcgactccgccgcagcgatgcgttatacggaaatccgtatgtcgaaaatcgcccacgagctgatggccgacctc

SEQ ID NO: 1772 - DNA, 968 bp, Legionella pneumophila strain pneumophila ATCC 33152
cagtacacaggcgagttctttttgcgatgagtgagttaagtaatgattggaataagccgtataaaaaatctgctcgtgtagtaggggatgtcattggtaaatatcatcctcatggggatacagctgtttatgacactattgttcgtatggctcagcccttttccatgcgttatatgctgattgatgggcagggtaattttggctctgtagatggagatgctccagctgccatgcgttacactgaagtaagaatgtccaaagtggcgcatgctttactggctgatttggataaggaaaccgttgattttagtcctaactatgatgaaacagaatttgctccagtggtattgccatcgagaattcccaatttactagttaatggctcttccggtattgcggtagggatggctactaatattccaccacataatcttaccgaagtaatcaatgcatgtattgctttagtggatgaacctgacacgagtcttgaagatttaatggaaattattcctggccctgattttcctacagccgcaattattaatggtcgtgctggaattattgaaggttatcgtactggaaaagggcgggttgttatcagggcacgcacagaaattgaaacggatgaaagttcaggccgtcagtcaattattattcaggaattaccctatcaggtgaataaagcgcgtttgatcgagcgtattgctgaattggtaagggacaagaaaatcgaaggaatttccggcttgagagatgagtcagacaagcaaggaatgagagtagtcattgaattaaaacgcaatgaagtagcagatgtggtattgaataacctgttcgctcatactcaaatgcaaaatgtattcggaattaatatggttgctctggtggatggccaaccgcgtactttgaatttgaagcaaatactggaatattttataaaacatcgaagagaggttgttaccagacgc

SEQ ID NO: 1773 - DNA, 967 bp, Proteus mirabilis ATCC 25933
caccgccgagtgctatttgcgatgaatgtactgggaaacgattggaataaaccttataaaaaatcagcccgtgttgttggggatgtaatcggtaaatatcacccgcacggtgacagtgctgtctatgaaacgattgttcgtttagcacagcctttttctatgcgctacatgttggttgacggtcagggtaacttcgggtcagttgatggtgactccgcggcggctatgcgttataccgaagttcgtatggcgaagatcgcccatgaactgctggcggatttggaaaaagagacggtcgactttgttcctaactatgatggaacagaaaatataccggctgttatgccaacccgtattccaaacttgttagttaatggctcttcaggtattgccgttgggatggcaacgaatatccctccgcataacctcggtgaagttatcgacggttgtcttgcctatgttgataatgaagacatcaccatagaagaattaatggaatatattaccgggcctgattttccgactgctgcgattattaatggtcgcagaggaatattagatgcttatcgtacagggcgtggaaagatttatatccgtgctcaggctgatattgaaactgatgagaaaacaggtcgcgaaaccattatcgtgacagaaattccttatcaggtgaataaagcccgtttaattgaaaaaattgcggagcttgtaaaagataaacgtattgaaggtatcagcggattacgtgacgagtctgataaagacggtatgcgtattgttgttgagatcaaacgtgatgcagtcggtgaagtagtattaaatcacctcttttcacaaactcaaatgcaagtctcttttggtattaatatggttgcgcttcatcaaggccaaccaaaattattgaacctaaaagaaattatcgcagcctttattcgccatcgtcgtgaagtggtgactcgccgtacca

SEQ ID NO: 1774 - DNA, 978 bp, Providencia rettgeri ATCC 9250
ccagtacaccgcagagtattgtatgcgatgaatgtattgggaaatgattggaataaaccctataaaaaatctgcccgtattgttggggacgtcatcggtaaataccatccacatggtgatagcgctgtttacgagacaatcgttcgtcttgctcagcctttctcaatgcgttacatgctggttgatggtcagggaaacttcggttctgttgacggagactccgcagcggcaatgcgttatacggaaatccgtatggcgaaaattgcccatgaactacttgctgaccttgaaaaagaaaccgttgatttcgttcctaactatgacggaacagagcacattcctgaagttatgccaacgaaaatcccaaaccttttggttaatgggtcgtcaggtattgctgttgggatggcaaccaatatcccacctcacaatttaggggaggtgattaatggttgtcttgcctatatagaagacgaagacatcagcattgatggtttaatggaacacattccagggcctgatttcccaaccgcagctattattaatggccgtcgtgggattattgatgcgtatcgcacagggcgtggcaaggtctatatccgtgcaagcgctgaagtggaagtcgatgagaaaaatggtcgcgaaaccattattgtcagcgaaattccttatcaagtgaataaagctcgcttgattgaaaaaattgctgagttagttaaagacaagcgtgttgaaggtatcagtgcactgcgtgacgagtctgataaagacggtatgcgtattgttattgaaatcaaacgcgatgcggtgggtgaagttgtactgaacaacttatattccctgacccaattgcaagtttcttttggtatcaatatggtagctctacaccaagggcagccgaaaatactgaatttaaaagatatcattgctgcttttgtgcgtcaccgccgtgaagtcgtcactcgtcgtacgattttc

SEQ ID NO: 1775 - DNA, 978 bp, Proteus vulgaris ATCC 13315
ccagtacaccgtcgcgttcttttcgcgatgaatgtattaggaaacgattggaataaaccttataaaaaatcagcccgtgttgttggggatgttatcggtaaatatcacccgcacggtgacagtgctgtttatgaaacgatagttcgtttagcacagcctttttctatgcgttacatgttggttgacgggcagggtaacttcgggtcagttgatggtgactcggcggctgcaatgcgttataccgaagttcgtatggcgaaaatcgcccatgaactgctggcggatttggaaaaagaaacggttgattttgttcctaactatgatggaacagagcatatcccggcagtcatgccaacccgtattccaaacttattagtcaatggttcttcaggtatcgcagtcgggatggcaacaaacattcctccgcataacctaggtgaagttatcgacggctgtcttgcttatgttgataacgaagacatcactattgaagagttgatggagcatatcacggggcctgatttcccaactgccgctattattaatggccgcagaggaattttagatgcttaccgtactgggcgcggaaaaatttatattcgtgcacaagctgatgtagaaaccgatgagaaaactggtcgcgaaacaattatcgtgacggaaattccttatcaggtgaacaaagctcgcttaattgaaaaaattgcagagcttgttaaagataaacgtattgaaggcattagcggattacgtgatgagtcagataaagatggtatgcgcattgttgttgaaattaagcgtgatgctgttggtgaagttgtactaaatcacttattttctcagactcagatgcaggtttcttttggtattaacatggttgcactgcatcaaggtcaaccgaaagtgttaaacctgaaagaaattatttcagcctttattcgtcaccgtcgtgaagtggtgactcgtcgtactattttt

SEQ ID NO: 1776 - DNA, 940 bp, Yersinia enterocolitica ATCC 9610
tgggtaatgactggaataagccatacaaaaaatcggcccgtgtagtcggggacgttatcggtaaatatcacccgcatggtgacagcgcggtctacgacacaattgtgcgtatggcccagccgttctcactgcgctatatgctggtggatgggcagggcaacttcggttccgttgatggcgactccgccgcagcgatgcgttataccgaaatccgtatgtctaaaattgctcacgaattgttggcggacttagaaaaagataccgtcgacttcgtgccgaactatgacggtacggagcaaattcctgccgtaatgccaacccgaatccctaacttgctggttaacggctcgtcaggtattgctgtcggtatggcaaccaatattccgccgcataacctttctgaggttattgatggctgtctggcctatatcgaagatgaaaacatcaccattgaagggttgatggagtacatcccggggccagatttcccaactgctgcgattatcaatggtcgccgtggtattgaagaagcttatcgtactggccgtggcaaggtgtatatccgtgcccgtgctgaagttgaggctgacgcttaaaccggtcgcgaaaccattattgttcacgagatcccgtatcaggtgaacaaggcgcggttgattgaaaaaatcgccgagctggttaaagaaaaacgcgtagaaggcatcagtgcgttgcgtgatgagtctgataaagacggcatgcgtatcgtgattgaaatcaaacgtgatgctgtcggggaagtggttctgaacaacctctattctctgacgcaattgcaggtgactttcggtatcaatatggtggctctgtctcaagggcagcctaagttgcttaacctgaaagacattttggttgctttcgtgcgccaccgccgtgaagtggtgactcgccgtaccatttt

SEQ ID NO: 1777 - DNA, 668 bp, Klebsiella oxytoca ATCC 13182
ccgtttattggcgatggcctgaagccggtccagcgtcgcatcgtctatgcgatgtctgaactgggtctgaacgccagcgcgaagttcaaaaagtccgcccgcaccgtcggtgacgtgctgggtaaataccatccccacggcgacagcgcgtgctatgaagccatggtgctgatggctcagcccttctcctaccgctatccgctggttgacggtcagggaaactggggggcgccggacgatcctaaatccttcgccgcaatgcgttataccgaatcccgtttgtcgaagtatgctgaactgctgctgagcgaactggggcaaggcaccgttgactgggtaccaaacttcgacggcactttgcaggagccgaagatgctgcctgcgcgcctgcccaatattctgctaaacggtactaccggcattgccgttgggatggcgacggacattccgccgcacaacctgcgtgaagtggcccgggcggccattaccctgattgaaaagccgcaaacttcgctggatgacctgctggatatcgtgcaggggccggattatcctaccgaagcggaaatcattaccccccgtgccgaaatccgcaaaatctaccagaatggccgcggttcggtgcggatgcgcgcggtatgggccaaagaagacggcgcggtggtgat

SEQ ID NO: 1778 - DNA, 714 bp, Klebsiella oxytoca ATCC 33496
gtttattggcgatggcctgaagccggtccagcgtcgcatcgtctatgcgatgtctgaactgggtctgaacgccagcgcgaagttcaaaaagtccgcccgcaccgtcggtgacgtgctgggtaaataccatccccacggcgacagcgcgtgctatgaagccatggtgctgatggctcagcccttctcctaccgctatccgctggttgacggtcagggaaactggggggcgccggacgatcctaaatccttcgccgcaatgcgttataccgaatcccgtttgtcgaagtatgctgaactgctgctgagcgaactggggcaaggcaccgttgactgggtaccaaacttcgacggcactttgcaggagccgaagatgctgcctgcgcgcctgcccaatattctgctaaacggtactaccggcattgccgttgggatggcgacggacattccgccgcacaacctgcgtgaagtggcccgggcggccattaccctgattgaaaagccgcaaacttcgctggatgacctgctggatatcgtgcaggggccggattatcctaccgaagcggaaatcattaccccccgtgccgaaatccgcaaaatctaccagaatggccgcggttcggtgcggatgcgcgcggtatgggccaaagaagacggcgcggtggtgattagcgcgctgccgcatcaggtttccggcgcccgcgtgcttgagcagat

SEQ ID NO: 1779 - DNA, 722 bp, Klebsiella pneumoniae subsp. ozaenae ATCC 11296
ttggcgatggcttaaaaccggtccagcgtcgcatcgtctatgcgatgtccgagctggggctgaacgccagcgcgaaattcaaaaagtccgcccgcaccgtcggcgacgtgttgggtaaatatcacccgcacggcgacagcgcctgctatgaagcgatggtgctgatggcgcagccgttctcttaccgctatccgctggtggatggtcagggaaactggggggcgccggacgatcccaaatctttcgccgccatgcgttacaccgaatcccgcctgtcgaagtatgccgagctgctgctcagcgagctggggcaggggacggtcgactgggtgccaaactttgacggtacgctgcaggagccgaaaatgctgccagcgcgtttgccgaacatcctgctgaacggcaccaccggcatcgcggtaggtatggcgaccgatattcctccgcacaacctgcgggaagtggccaaagcggcgattacgctgattgagcagccgaaaaccaccctcgacgaactgctggatatcgtacaggggccggatttcccgaccgaggcggagatcatcacctcgcgggcggaaattcgaaaaatctaccagaacgggcgcggctcagtgcgcatgcgcgcggtgtggagtaaagaggacggcgcggtggtgatcagcgcgctgccgcatcaggtctccggcgccaaagtgctggagcagattgcggcgcagatg

SEQ ID NO: 1780 - DNA, 692 bp, Klebsiella planticola ATCC 33531
gtccagcgtcgcatcgtttatgcgatgtctgagctggggctgaacgccagcgcgaagttcaaaaagtccgcccgcaccgtgggtgatgtgctgggtaaatatcacccgcacggcgatagcgcatgctatgaagctatggtgctgatggcgcagccattctcctaccgctacccgctggtggatgggcaggggaactggggggcaccggacgatcctaaatccttcgccgcgatgcgttataccgaatcccgtttgtcgaagtatgcggaactgctgctgggcgaactggggcagggaaccgtcgactgggtgccgaacttcgacgggacgatgcaggagccgaaaatgctgcctgcgcgtctgccgaatattctgctgaacggcactaccggcatcgccgtcggtatggcaaccgatattcctccgcacaacctgcgtgaagtggcgcaggcggcgattaccctgatcgaaaaaccgcagacctcgctcgacgaactgctggatatcgttcacggacccgactacccgaccgaagccgaaatcattactccacgcgcggagatccgcaaaatctaccagaacggccgcggttcggtgcggatgcgcgcggtatggaaaaaagaggacggcgcggtcgtgattacggcgttgccgcatcaggtttccggcgcccgcgtgctggagcaaattgc

SEQ ID NO: 1781 - DNA, 700 bp, Klebsiella pneumoniae ATCC 27336
gtttattggcgatggcttaaaaccggtccagcgtcgcatcgtctatgcgatgtccgagctggggctgaacgccagcgcgaaattcaaaaagtccgcccgcaccgtcggcgacgtgttgggtaaatatcacccgcacggcgacagcgcctgctatgaagcgatggtgctgatggcgcagccgttctcttaccgctatccgctggtggatggtcagggaaactggggggcgccggacgatcccaaatctttcgccgccatgcgttacaccgaatcccgcctgtcgaagtatgccgagctgctgctcagcgagctggggcaggggacggtcgactgggtgccaaactttgacggcacgctgcaggagccgaaaatgctgccagcgcgtttgccgaacatcctgctgaacggcaccaccggcatcgcggtaggcatggcgaccgatattcctccgcacaacctgcgggaagtggccaaagcggcgattacgctgattgagcagccgaaaaccaccctcgacgaactgctggatatcgtacaggggccggatttcccgaccgaggcggagatcatcacctcgcgggcggaaattcgcaaaatctaccaaaacgggcgcggctcagtgcgcatgcgcgcggtgtggagtaaagaggacggcgcggtggtgatcagcgcgctgccgcatcaggtctccggcgccaaa

SEQ ID NO: 1782 - DNA, 726 bp, Klebsiella pneumoniae subsp. pneumoniae ATCC 13883
attggcgatggcttaaaaccggtccagcgtcgcatcgtctatgcgatgtccgagctggggctgaacgccagcgcgaaattcaaaaagtccgcccgcaccgtcggcgacgtgttgggtaaatatcacccgcacggcgacagcgcctgctatgaagcgatggtgctgatggcgcagccgttctcttaccgctatccgctggtggatggtcagggaaactggggggcgccggacgatcccaaatctttcgccgccatgcgttacaccgaatcccgcctgtcgaagtatgccgagctgctgctcagcgagctggggcaggggacggtcgactgggtgccaaactttgacggcacgctgcaggagccgaaaatgctgccagcgcgtctgccgaacatcctgctgaacggcaccaccggcatcgcggtaggcatggcgaccgatattcctccgcacaacctgcgggaagtggccaaagcggcgattacgctgattgagcagccgaaaaccaccctcgacgaactgctggatatcgtacaggggccggatttcccgaccgaggcggagatcatcacctcgcgggcggaaattcgcaaaatctaccagaacgggcgcggctcagtgcgcatgcgcgcggtgtggagtaaagaggacggcgcggtggtgatcagtgcgctgccgcatcaggtctctggcgccaaagtgctggagcagattgcggcgcagatgcgc

SEQ ID NO: 1783 - DNA, 706 bp, Klebsiella pneumoniae subsp. pneumoniae ATCC 29011
ggcttaaaaccggtccagcgtcgcatcgtctatgcgatgtccgagctggggctgaacgccagcgcgaaattcaaaaagtccgcccgcaccgtcggcgacgtgttgggtaaatatcacccgcacggcgacagcgcctgctatgaagcgatggtgctgatggcgcagccgttctcttaccgctatccgctggtggatggtcagggaaactggggggcgccggacgatcccaaatcttttgccgccatgcgttacaccgaatcccgcctgtcgaagtatgccgagctgctgctcagcgagctggggcaggggacggtcgactgggtgccaaactttgacggcacgctgcaggagccgaaaatgctgccagcgcgtctgccgaacatcctgctgaacggcaccaccggcatcgcggtaggcatggcgaccgatattcctccgcacaacctgcgggaagtggccaaagcggcgattacgctgattgagcagccgaaaaccaccctcgacgaactgctggatatcgtacaggggccggatttcccgaccgaggcggagatcatcacctcgcgggcggaaattcgcaaaatctaccagaacgggcgcggctcagtgcgcatgcgcgcggtgtggagtaaagaggacggcgcggtggtgatcagtgcgctgccgcatcaggtctccggcgccaaagtgctggagcagattgcgg

SEQ ID NO: 1784 - DNA, 614 bp, Klebsiella pneumoniae subsp. rhinoscleromatis ATCC 13884
ttggcgatggcttaaaaccggtccagcgtcgcatcgtctatgcgatgtccgagctggggctgaacgccagcgcgaaattcaaaaagtccgcccgcaccgtcggcgacgtgttgggtaaatatcacccgcacggcgacagcgcctgctatgaagcgatggtgctgatggcgcagccgttctcttaccgctatccgctggtggatggtcagggaaactggggggcgccggacgatcccaaatctttcgccgccatgcgttacaccgaatcccgcctgtcgaagtatgccgagctgctgctcagcgagctggggcaggggacggtcgactgggtgccaaactttgacggcacgctgcaggagccgaaaatgctgccagcgcgtctgccgaacatcctgctgaacggcaccaccggcatcgcggtaggcatggcgaccgatattcctccgcacaacctgcgggaagtggccaaagcggcgattacgctgattgagcagccgaaaaccaccctcgacgaactgctggatatcgtacaggggccggatttcccgaccgaggcggagatcatcacctcgcgggcggaaattcgcaaaatctaccagaacgggcgcggctca

SEQ ID NO: 1785 - DNA, 668 bp, Klebsiella terrigena ATCC 33257
gcctgaaaccggtccagcggcgcatcgtttatgcgatgtccgaactgggtctgaacgccaccgctaaattcaaaaaatccgcgcgcaccgtcggcgacgtgctgggtaaatatcacccgcacggcgatagcgcctgctatgaggcgatggtgctgatggcgcagccgttctcttaccgctacccgctggtggacggtcagggcaactggggcgccccggacgatcccaaatccttcgccgcgatgcgttataccgaatcccgcctgtcaaagtatgcggagctgctgctgggcgagctgggtcagggaaccgttgactgggtacctaactttgacggtacgatgcaggagccgaaaatgctgcctgcgcgtttgccgaatattctgctcaacggcaccaccggtatcgccgtggggatggccaccgatattccgccgcacaacctgcgcgaagtggccaaagcggccatcaccctgattgaaaagccgcagacctcgctcgacgaactgctggatatcgttcacgggccggactaccccaccgaagctgaaatcatcaccccgcgcgccgagatccgcaaaatctatcagaacggtcgcggctcggttcgcatgcgtgcggtgtggaaaaaagaggacggcgcggtggtgattagcgccctgccgcat

SEQ ID NO: 1786 - DNA, 113 bp, Bacillus cereus ATCC 7064
cattacgttctaacactcaaggacgcggaacattctctatggtgtttgaccactatgaagaagtaccaaagtctgtttctgaagaaattatcaaaaaaaataaaggtgaataa

SEQ ID NO: 1787 - DNA, 118 bp, Bacillus cereus ATCC 14579
aacgtcattacgttctaacactcaaggacgcggaacattctctatggtgtttgaccactatgaagaagtaccaaagtctgtttctgaagaaattatcaaaaaaaataaaggtgaataa

SEQ ID NO: 1788 - DNA, 120 bp, Bacillus anthracis strain CIP 9444
gcaacgtcattacgttctaacactcaaggacgcggaacattctctatggtgtttgaccactatgaagaagtaccaaagtctgtttctgaagaaattatcaaaaaaaataaaggtgaataa

SEQ ID NO: 1789 - DNA, 118 bp, Bacillus cereus ATCC 13472; identical to SEQ ID NO: 1787

SEQ ID NO: 1790 - DNA, 120 bp, Bacillus anthracis ATCC 4229; identical to SEQ ID NO: 1788

SEQ ID NO: 1791 - DNA, 120 bp, Bacillus pseudomycoides NRRL B-617
gcaacgtcattacgttctaacacgcaaggacgcggaacattctcaatgacatttgatcattatgaagaagtaccgaagtctgtttcagaagaaattatcaaaaaaaataaaggtgaataa

SEQ ID NO: 1792 - DNA, 116 bp, Bacillus cereus ATCC 49064
cgtcattacgttctaacactcaaggacgcggaacattctctatggtgtttgaccactatgaagaagtaccaaagtctgtttctgaagaaattatcaaaaaaaataaaggtgaataa

SEQ ID NO: 1793 - DNA, 120 bp, Bacillus anthracis strain CIP 9440; identical to SEQ ID NO: 1788

SEQ ID NO: 1794 - DNA, 100 bp, Bacillus cereus ATCC 15816
cactcaaggacgcggaacattctctatggtgtttgatcactatgaagaagtaccaaagtctgtttctgaagaaattatcaaaaaaaataaaggtgaataa

SEQ ID NO: 1795 - DNA, 120 bp, Bacillus weihenstephanensis strain WSBC 10204
gcaacggcattacgttctaacactcaaggacgcggaacattctcaatgacatttgatcattatgaagaagtaccgaagtctgtttctgaagaaattattaaaaaaaataaaggtgaataa

SEQ ID NO: 1796 - DNA, 120 bp, Bacillus mycoides ATCC 6462
gcgacagcattacgttctaacactcaaggacgcggaacattctcaatgacatttgatcattatgaagaagtaccgaagtctgtttcagaagaaattattaaaaaaaataaaggcgaataa

SEQ ID NO: 1797 - DNA, 120 bp, Bacillus thuringiensis ATCC 10792; identical to SEQ ID NO: 1788

SEQ ID NO: 1798 - DNA, 117 bp, Bacillus weihenstephanensis strain WSBC 10204
ttgatttttatcgattgttcaagtataactacttatgtaagcttagaaagtgagacgcaagtttcactttctagtctaaatataaaataacccatataaactaaggaggaatttaga

SEQ ID NO: 1799 - DNA, 117 bp, Bacillus thuringiensis ATCC 10792
ttgatttttatcgattgttcaagtataactacttatgtaagcttagaaagtgggacgtaagtttcactttctagtctaaatataaaataacctatataaactaaggaggaatttaga

SEQ ID NO: 1800 - DNA, 117 bp, Bacillus anthracis ATCC 4229
ttgatttttatcgattcttcacgtataactacttatgtaagcttagaaagtgggacgcaagtttcgctttctagcctaaatataaaataacctatataaactaaggaggaatttaga

SEQ ID NO: 1801 - DNA, 117 bp, Bacillus pseudomycoides NRRL B-617
ttgatttttatcgattgttcaagtataactacttatgtaagcttagaaagtgggacttaagtttcactttctagtctaaatataaaataacctatataaactaaggaggaatttaga

SEQ ID NO: 1802 - DNA, 117 bp, Bacillus anthracis strain CIP 9444; identical to SEQ ID NO: 1800

SEQ ID NO: 1803 - DNA, 117 bp, Bacillus cereus ATCC 7064
ttgatttttatcgattcttcacgtataactacttatgtaagcttagaaagtgagacgcaagtttcgctttctagcctaaatataaaataacctatataaactaaggaggaatttaga

SEQ ID NO: 1804 - DNA, 117 bp, Bacillus cereus ATCC 49064
ttgatttttatcgattcttcacgtataactacttatgtaagcttagaaagtgggacgcaagtttcactttctagcctaaatataaaataacctatataaactaaggaggaatttaga

SEQ ID NO: 1805 - DNA, 117 bp, Bacillus mycoides ATCC 6462
ttgatttttatcaattgttcgagtataactacttatgtaagcttagaaagtgggacgtaagtttcgctttctagtctaaatataaaataacctatataaactaaggaggaatttaga

SEQ ID NO: 1806 - DNA, 117 bp, Bacillus cereus ATCC 14579; identical to SEQ ID NO: 1799

SEQ ID NO: 1807 - DNA, 117 bp, Bacillus cereus ATCC 15816; identical to SEQ ID NO: 1800

SEQ ID NO: 1808 - DNA, 117 bp, Bacillus cereus ATCC 13472; identical to SEQ ID NO: 1799

SEQ ID NO: 1809 - DNA, 116 bp, Bacillus anthracis strain CIP 9440
ttgatttttatcgattcttcacgtataactacttatgtaagcttagaaagtgggacgcaagtttcgctttctagcctaaatataaaataacctatataaactaaggaggaatttag

SEQ ID NO: 1810 - DNA, 278 bp, Bacillus mycoides ATCC 6462
atggctaaagctaaattcgaacgttctaaaccccatgttaacatcggtacaatcggccacgttgaccatggtaaaactacattaactgctgcgatcactacagttcttgcaaaagctggtggtgctgaagcacgcggatacgatcaaatcgacgctgctccagaagaaagagagcgcggaatcacaatctcaactgcacacgttgagtacgaaactgaaactcgtcactatgcacacgttgactgcccaggtcacgctgactatgttaaaaacatgat

SEQ ID NO: 1811 - DNA, 278 bp, Bacillus thuringiensis ATCC 10792
atggctaaagctaaattcgaacgttctaaaccccatgttaacatcggtacaatcggccacgttgaccatggtaaaactacattaactgctgcgatcactacagttcttgcaaaagctggtggtgctgaagcacgcggatacgatcaaatcgatgctgctccagaagaaagagagcgcggtatcacaatctcaactgcacacgttgagtacgaaactgaaactcgtcactatgcacacgttgactgcccaggtcacgctgactatgttaaaaacatgat

SEQ ID NO: 1812 - DNA, 270 bp, Bacillus cereus ATCC 15816
atggctaaagctaaattcgaacgttctaaaccccatgttaacatcggtacaatcggccacgttgaccatggtaaaactacattaactgctgcgatcactacagtacttgcaaaagctggtggtgctgaagcacgcggatacgatcaaatcgatgctgctccagaagaaagagagcgcggtatcacaatctcaactgcacacgttgagtacgaaactgaaactcgtcactatgcacacgttgactgcccaggtcacgctgactatgttaaa

SEQ ID NO: 1813 - DNA, 278 bp, Bacillus weihenstephanensis strain WSBC 10204
atggctaaagctaaattcgaacgttctaaaccccatgttaacatcggtacaatcggccacgttgaccatggtaaaactacattaactgctgcgatcactacagttcttgcaaaagctggtggtgctgaagcacgcggatacgatcaaatcgacgctgctccagaagaaagagagcgcggaatcacaatctcaactgcacacgttgagtacgaaactgaaactcgtcactatgcacacgttgactgcccaggtcatgctgactatgttaaaaacatgat

SEQ ID NO: 1814 - DNA, 266 bp, Bacillus anthracis strain CIP 9440
atggctaaagctaaattcgaacgttctaaaccccatgttaacatcggtacaatcggccacgttgaccatggtaaaactacattaactgctgcgatcactacagtacttgcaaaagctggtggtgctgaagcacgcggatacgatcaaatcgatgctgctccagaagaaagagagcgcggtatcacaatctcaactgcacacgttgagtacgaaactgaaactcgtcactatgcacacgttgactgcccaggtcacgctgactatgt

SEQ ID NO: 1815 - DNA, 269 bp, Bacillus cereus ATCC 7064
atggctaaagctaaattcgaacgttctaaaccccatgttaacatcggtacaatcggccacgttgaccatggtaaaactacattaactgctgcgatcactacagtacttgcaaaagctggtggtgctgaagcacgcggatacgatcaaatcgatgctgctccagaagaaagagagcgcggtatcacaatctcaactgcacacgttgagtacgaaactgaaactcgtcactatgcacacgttgactgcccaggtcacgctgactatgttaa

SEQ ID NO: 1816 - DNA, 268 bp, Bacillus cereus ATCC 13472
atggctaaagctaaattcgaacgttctaaaccccatgttaacatcggtacaatcggccacgttgaccatggtaaaactacattaactgctgcgatcactacagttcttgcaaaagctggtggtgctgaagcacgcggatacgatcaaatcgatgctgctccagaagaaagagagcgcggtatcacaatctcaactgcacacgttgagtacgaaactgaaactcgtcactatgcacacgttgactgcccaggtcacgctgactatgtta

SEQ ID NO: 1817 - DNA, 278 bp, Bacillus anthracis ATCC 4229
atggctaaagctaaattcgaacgttctaaaccccatgttaacatcggtacaatcggccacgttgaccatggtaaaactacattaactgctgcgatcactacagtacttgcaaaagctggtggtgctgaagcacgcggatacgatcaaatcgatgctgctccagaagaaagagagcgcggtatcacaatctcaactgcacacgttgagtacgaaactgaaactcgtcactatgcacacgttgactgcccaggtcacgctgactatgttaaaaacatgat

SEQ ID NO: 1818 - DNA, 268 bp, Bacillus cereus ATCC 14579; identical to SEQ ID NO: 1816

SEQ ID NO: 1819 - DNA, 278 bp, Bacillus anthracis strain CIP 9444; identical to SEQ ID NO: 1817

SEQ ID NO: 1820 - DNA, 278 bp, Bacillus pseudomycoides NRRL B-617
atggctaaagctaaattcgaacgttctaaaccccatgttaacatcggtacaatcggccacgttgaccatggtaaaactacattaactgctgcgatcactacagttcttgcaaaagctggtggtgctgaagcacgcggatacgaccaaatcgatgctgctccagaagaaagagagcgcggtatcacaatctcaactgcacacgttgagtacgaaactgaaactcgtcactatgcacacgttgactgcccaggtcacgctgactatgttaaaaacatgat

SEQ ID NO: 1821 - DNA, 263 bp, Bacillus cereus ATCC 49064
atggctaaagctaaattcgaacgttctaaaccccatgttaacatcggtacaatcggccacgttgaccatggtaaaactacattaactgctgcgatcactacagtacttgcaaaagctggtggtgctgaagcacgcggatacgatcaaatcgatgctgctccagaagaaagagagcgcggtatcacaatctcaactgcacacgttgagtacgaaactgaaactcgtcactatgcacacgttgactgcccaggtcacgctgacta

SEQ ID NO: 1822 - DNA, 1668 bp, Streptococcus oralis ATCC 35037
caatcgaagtacaacgttctcttcgwgtattggacggtgcggttactgttcttgactcacaatcaggtgttgagcctcaaactgaaacagtttggcgtcaagcaactgagtacggagttccacgtatcgtatttgctaacaaaatggacaaaatcggtgctgacttcctttactcagtaagcacacttcacgaccgtcttcaagcaaacgcacacccaatccaattgccaatcggtgctgaagatgacttccgtggtatcatcgacttgatcaagatgaaagctgaaatctatactaacgaccttggtacagatatccttgaagaagatattccagctgaataccttgaccaagctcaagaataccgtgaaaaattggttgaagcagtcgctgaaactgatgaagacttgatgatgaaataccttgaaggtgaagaaatcactaacgaagaattgaaagctgctatccgtaaagcaactatcaacgttgaattcttcccagtattgtgtggttctgccttcaagaacaagggtgttcaattgatgcttgatgcggttatcgactaccttccaagcccacttgatatcccagcgatcaaaggtatcaacccagatwcagatgaagaagaaactcgtccagcatctgacgaagagccattcgcagctcttgccttcaagatcatgacggacccatttgtaggtcgtttgacattcttccgtgtatactcargtgttctccaatcargktcttacgtattgaacacatctaaaggtaaacgtgaacgtatcggacgtatccttcaaatgcacgctaacagccgtcaagaaattgacactgtttactcaggtgatatcgctgctgccgttggtttgaaagatactycaactggtgactcattgmcagatgaaaaagctaaaatcatccttgagtcaatcaacgttccagamccagttatccaattgatggttgagccaaaatctaaagctgaccaagataagatgggtatcgcccttcaaaaattggctgaagaagatccaacattccgcgttgaamcaaacgttgaaactggtgaamcagttatctcaggtatgggtgagcttcacttggacgtccttgttgaccgtatgcgtcgtgagttcaaagtggaagcgaacgtaggtgctcctcaagtatcttaccgtgaaacattccgcgcttctactcaagcacgtggattcttcaaacgtcagtctggtggtaaaggtcaattcggtgatgtatggattgaatttactccaaacgaagaaggtaaaggattcgaattcgaaaacgcaatcgtcggtggtgtggttcctcgtgaatttatcccagcggttgaaaaaggtttggtagaatctatggctaacggtgttcttgcaggttacccaatggttgacgttaaagctaagctttacgatggttcataccacgatgtcgactcatctgaaactgccttcaagatcgcggcttcacttgcccttaaagaagctgctaagtcagcacaaccagctatccttgagccaatgatgcttgtaaccatcactgttccagaagaaaaccttggtgatgttatgggtcacgtaactgctcgtcgtggacgtgtagatggtatggaagcacwcggtaacagccaaatcgttcgtgcttacg

SEQ ID NO: 1823 - DNA, 115 bp, Budvicia aquatica ATCC 35567
agacctgcgttcacaaacacagggtcgtgcttcttactctatggagttcttgaagtacaacgaagcgccaaacaacgttgctacagcaatcattgaagctcgtaaggctagataa

SEQ ID NO: 1824 - DNA, 107 bp, Buttiauxella agrestis ATCC 33320
ctgcgttcactgaccaaggtcgtgcatcttactccatggaattcctgaagtatgatgacgcgccaaacaacgtagctcaggccgtaatcgaagctcgcggtaaataa

SEQ ID NO: 1825 - DNA, 79 bp, Klebsiella oxytoca ATCC 13182
ttactccatggagttcctgaagtatgatgatgcgccgaacaacgttgctcaggccgtaatcgaagcccgtggtaaataa

SEQ ID NO: 1826 - DNA, 111 bp, Plesiomonas shigelloides ATCC 14029
cagctgcgttctctgaccaaaggtcgtgcatcatacactatggaattcctgaagtatgatgatgcgccaaacaacgttgctcaggccgttattgaagcccgtggtaagtaa

SEQ ID NO: 1827 - DNA, 108 bp, Shewanella putrefaciens ATCC 8071
gatttgcgctctgcaactcatgggcgtgcttcgtactccatggagttcttgaagtactctgatgcaccgcaaaacattgcgaaagcgattattgaatctcgtagctaa

SEQ ID NO: 1828 - DNA, 113 bp, Obesumbacterium proteus ATCC 12841
ctcagctgcgttctctgaccaaaggtcgtgcatcttactccatggaattcctgaagtatgatgatgcgcctaacaacgttgctcaggccgttattgaagctcgtggcaaataa

SEQ ID NO: 1829 - DNA, 70 bp, Klebsiella oxytoca ATCC 13182
gccgcagggttaaaaccaaagtcccgtgctctctcctgaaggggagagcactatagtaaggaatatagcc

SEQ ID NO: 1830 - DNA, 66 bp, Budvicia aquatica ATCC 35567
gcctcgggtaaaacttatatcccagtccccctcgtatagagggggatagagtaaaggaagataatc

SEQ ID NO: 1831 - DNA, 81 bp, Plesiomonas shigelloides ATCC 14029
tccacaggattaaaacccaggtttaaacctaagtcccgtgctctctcctcaggggagagcacaatagtaaggaatatagcc

SEQ ID NO: 1832 - DNA, 70 bp, Obesumbacterium proteus ATCC 12841
gctactagtttaaaacattgatcccgtgctctctctatgaagggagagcacaagagtaaggaataaagcc

SEQ ID NO: 1833 - DNA, 72 bp, Shewanella putrefaciens ATCC 8071
tttccagttacgacataaatgttattatggtccagctttgactggactattctgaaaagaaaggaatatatc

SEQ ID NO: 1834 - DNA, 73 bp, Buttiauxella agrestis ATCC 33320
gccccgggttttaaaaaacattgatcccgtgctctctccagaaggggagagcgcaacagtaaggaatatagcc

SEQ ID NO: 1835 - DNA, 795 bp, Campylobacter coli ATCC 43479
ctgcagctgatggtcctatgccacaaactagagagcacatccttctatcacgccaagtaggtgttccatatatcgttgtatttatgaataaagcagatatggttgatgatgctgaacttttagaattggttgaaatggaaattagagaattattaagctcttatgatttcccaggtgatgacacacctattatttcaggttctgctttaaaagctcttgaagaagcaaaagctggacaagatggcgaatggtcagcgaaaattatggatcttatggctgctgttgatagctatattccaactccaactcgtgacactgaaaaagatttcttaatgccaattgaagatgttttctcaatttcaggtcgtggtactgttgttacaggtagaattgaaaaaggtattgtaaaagttggtgatactatagaaatcgttggtattaaagatactcaaacaacaactgtaactggcgttgaaatgtttagaaaagaaatggaccaaggtgaagcaggggataatgttggtgttcttcttcgtggtacaaaaaaagaagaagttatccgcggtatggttcttgctaaaccaaaatcaattactccacatactgatttcgaagctgaagtttatatcctaaataaagatgagggtggtagacatactccattctttaataactatagaccgcaattctatgtaagaacaacagatgtaacaggttctattaaattagctgatggcgttgaaatggttatgcctggtgaaaatgtaagaattactgtaagcttgattgcaccag

SEQ ID NO: 1836 - DNA, 817 bp, Campylobacter fetus subsp. fetus ATCC 25936
gccatactagttgtttctgcagctgatggcccaatgccacaaactagagagcacattttgctatctcgtcaagttggtgttccatatatagttgtttttatgaacaaagctgatatggtagatgacgcagagttgctagaattagttgaaatggagatcagagagttattaagcgaatatgacttccctggtgatgatactcctattataagcggatcagcacttcaagctcttgaagaagctaaagctggtaatgatggcgaatggtcagctaagattatggatcttatggctgctgttgatagctacataccaactccagttcgtgctactgataaagatttcttaatgccgattgaagacgtattctcaatttctggccgtggtactgttgttactggtagaattgaaaaaggtatagttaaagttggtgatactatcgaaatcgtaggtattagagatacacaaactacaacagttaccggcgttgaaatgtttagaaaagaaatggatcaaggcgaggctggtgataacgttggtgttcttttacgcggtacaaagaaagaagacgttgaaagaggtatggttctttgtaagccaaaatcaattactcctcatactaaatttgagggagaagtttatatcttgactaaggaagagggcggtagacatactccattcttcaacaactatagaccacaattttatgtaagaacaacagatgttactggatcaatcactcttccagagggtactgagatggttatgcctggtgataacttaaaaatcactgttgagttaatcaacccagttgctc

SEQ ID NO: 1837 - DNA, 798 bp, Campylobacter fetus subsp. venerealis ATCC 33561
ccatactagttgtttctgcagctgatggcccaatgccacaaactagagagcacattttgctatctcgtcaagttggtgttccatatatagttgtttttatgaacaaagctgatatggtagatgacgcagagttgctagaattagttgaaatggagatcagagagttattaagcgaatatgacttccctggtgatgatactcctattataagcggatcagcacttcaagctcttgaagaagctaaagctggtaatgatggcgaatggtcagctaagattatggatcttatggctgctgttgatagctacataccaactccagttcgtgctactgataaagatttcttaatgccgattgaagacgtattctcgatttctggccgtggtactgttgttactggtagaattgaaaaaggtatagttaaagttggtgatactatcgaaatcgtaggtattagagatacacaaactacaacagttaccggcgttgaaatgtttagaaaagaaatggatcaaggcgaggctggtgataacgttggtgttcttttacgcggtacaaagaaagaagacgttgaaagaggtatggttctttgtaagccaaaatcaattactcctcatactaaatttgagggagaagtttatatcttgactaaggaagagggcggtagacatactccattcttcaacaactatagaccacaattttatgtaagaacaacagatgttactggatcaatcactcttccagagggtactgagatggttatgcctggtgataacttaaaaatcactgttagtt

SEQ ID NO: 1838 - DNA, 1116 bp, Buttiauxella agrestis ATCC 33320
gtgtctaaagaaaaatttgaacgtacaaaaccgcacgtcaacgtcggtactatcggccacgttgaccatggtaaaactactctgactgcagcaatcactaccgttctggctaaaacctacggcggttctgcacgcgcattcgaccagatcgataacgcaccagaagaaaaagctcgtggtatcaccatcaacacttcccacgttgaatatgacaccccgactcgtcactacgcgcacgttgactgcccagggcacgccgactacgttaaaaacatgatcaccggtgctgctcagatggacggcgctatcctggttgttgctgcgactgatggcccgatgccacagactcgtgagcacatcctgctgggtcgccaggttggcgttccattcatgatcgtgttcatgaacaaatgtgacatggttgatgacgaagagctgctggaactggtagaaatggaagttcgtgaacttctgtctgcttatgatttcccgggcgacgacatcccagtggttcgtggttcagctctgaaagcgctggaaggcgaagcagagtgggaagctaaaatcatcgagctggctggtcacctggataactacatcccagaaccagagcgtgctatcgacaagccattcctgctgccaatcgaagacgtattctccatctccggccgtggtactgttgttactggtcgtgtagagcgtggtatcattaaagttggtgaagaagtagaaatcgttggtatcaaagataccgtgaaatctacctgtactggcgttgaaatgttccgcaaactgctggacgaaggccgtgctggtgagaacgttggtgttctgctgcgtggtattaaacgtgaagatatcgaacgtggtcaggttctggctaagccaggctctatcaagccgcacactcagttcgaatcagaagtttatatcctgtccaaagatgaaggcggccgtcatactccgttcttcaaaggctaccgtccacagttctacttccgtacaactgacgtgactggcaccatcgaactgccagaaggcgttgagatggtaatgccgggcgacaacattcaaatggttgttaccctgatccacccaatcgcaatggacgacggt

SEQ ID NO: 1839 - DNA, 1109 bp, Klebsiella oxytoca ATCC 13182
gtgtctaaagaaaaatttgaacgtacaaaaccgcacgtcaacgtcggtactatcggccacgttgaccatggtaaaactactctgaccgctgcaatcactaccgttctggctaaaacctacggtggtgctgctcgcgcattcgaccagatcgataacgcgccggaagaaaaagctcgtggtatcaccatcaacacttcccacgttgaatatgacaccccgactcgccactacgcgcacgtagactgcccgggccacgccgactatgttaaaaacatgatcaccggtgctgcgcagatggacggcgcgatcctggttgttgctgcgactgacggcccgatgccgcagactcgtgagcacatcctgctgggtcgtcaggtaggcgttccgtacatcatcgtgttcctgaacaagtgcgacatggttgatgacgaagagctgctggaactggttgaaatggaagttcgtgaacttctgtctcagtacgatttcccgggcgacgacactccgatcgttcgtggttctgctctgaaagctctggaaggcgacgctgagtgggaatctaaaatcatcgaactggctggcttcctggattcttatattccggaaccagagcgtgcgattgacaagccgttcctgctgccgatcgaagacgtattctccatctccggtcgtggtaccgttgttaccggtcgtgtagagcgcggtatcatcaaagttggcgaagaagttgaaatcgttggtatcaaagacactgctaagtctacctgtactggcgttgaaatgttccgcaaactgctggacgaaggccgtgctggtgagaacgttggtgttctgctgcgtggtatcaaacgtgaagaaatcgaacgtggtcaggtactggctaagccgggctctatcaagccgcacaccaagttcgaatctgaagtttatatcctgtccaaagacgaaggcggccgtcacactccgttcttcaaaggctaccgtccgcagttctacttccgtacaactgacgtgactggcaccatcgaactgccggaaggcgtagagatggttatgccgggcgacaacatcaaaatggttgttaccctgatccacccgatcgcgatgga

SEQ ID NO: 1840 - DNA, 1108 bp, Plesiomonas shigelloides ATCC 14029
gtgtctaaagaaaaatttgaacgtactaaaccgcacgttaacgttggtactatcggccacgttgaccacggtaaaactaccctgactgcagctatcactaccgtactgtctaaagtatacggtggtcaggctcgtgcattcgatcagatcgataacgcgccagaagaaaaagctcgtggtatcaccatcaacacttctcacgtagagtacgacaccccaactcgtcactacgcgcacgttgactgcccaggtcacgccgactacgtgaagaacatgatcactggtgctgctcagatggacggcgctatcctggtagtagctgcgactgacggcccaatgcctcagactcgtgagcacatcctgctgggtcgtcaggtaggcgttccttacatcatcgtgttcctgaacaagtgtgacatggttgatgacgaagagctgctggaactggtagaaatggaagtacgtgagctgctgtctcagtacgacttcccaggcgacgatactccagttgttcgcggttctgcactgaaagcgctggaaggcgatgctcagtgggaagagaagattgttgaactggcaggctacctggacagctacatccctgagccagagcgtgctatcgacaagccattcctgctgccaatcgaagacgtattctctatctccggccgtggtactgtagtaactggtcgtgtagagcgcggtatcatcaaagttggtgaagaagtagaaatcgttggtatcaaagagactaccaagactacttgtactggcgttgaaatgttccgtaagctgctggacgaaggtcgtgcgggcgagaacgtaggtgttctgctgcgtggtaccaagcgtgatgacgtagagcgtggtcaggttctggctaagccaggctcaatcaacccacacaccaactttgtagcagaagtttatattctgtccaaagatgaaggtggtcgtcacactccattcttcaaaggctaccgtccacagttctacttccgtacaactgacgtgaccggtaccatcgaactgccagaaggcgtagagatggtaatgccaggtgacaacattcaaatggttgttaccctgattgcaccaatcgcgatgg

SEQ ID NO: 1841 - DNA, 1107 bp, Shewanella putrefaciens ATCC 8071
tggcaaaagctaaatttgaacgtattaagcctcacgtaaacgtgggcaccattggtcacgttgaccatggtaaaaccactctgactgcagctatctctcacgtactggctaagacctacggtggcgaagctaaagacttctctcaaatcgataacgctccagaagagcgtgagcgcggtattaccatcaatacctctcacatcgaatatgacacgccatcacgccactacgcccacgtagactgcccaggccacgctgactatgttaaaaacatgatcactggtgctgcacagatggacggcgcgattctggtagtcgcttcaacagacggtccaatgccacagactcgtgagcacatcctgctttctcgtcaggttggcgtaccattcatcatcgtattcatgaacaaatgtgacatggtagatgacgaagagctgttagagctagttgagatggaagtgcgtgaactgttatcagaatacgatttcccaggtgatgacttaccggtaatccaaggttcagctctgaaagcgctagaaggcgagccagagtgggaagcaaaaatccttgaattagcagcggcgctggattcttacattccagaaccacaacgtgacatcgataagccgttcctactgccaatcgaagacgtattctcaatttcaggccgtggtacagtagtaacaggtcgtgttgagcgtggtattgtacgcgtaggcgacgaagttgaaatcgttggtgtacgtgcgacaactaagacaacgtgtactggtgtagaaatgttccgtaaactgcttgacgaaggtcgtgcaggtgagaactgtggtattttgttacgtggtactaagcgtgatgacgtagaacgtggtcaagtattagcgaagccaggttcaatcaacccacacactacttttgaatcagaagtttacgtactgtcaaaagaagaaggtggtcgtcacacgccattcttcaaaggctaccgtccacagttctacttccgtacaactgacgtaaccggtactatcgaactgccagaaggcgtagagatggtaatgccaggcgataacatcaagatggtagtgacactgatttgcccaatcgcgatgg

SEQ ID NO: 1842 - DNA, 1116 bp, Obesumbacterium proteus ATCC 12841
gtgtctaaagaaaaatttgaacgtacaaaaccgcacgttaacgttggtacaatcggccacgttgaccacggtaaaactaccctgactgctgcaatcactaccgttctggctaaaacctacggtggttctgcacgtgcattcgaccagatcgataacgcgccagaagaaaaagctcgtggtatcaccatcaacacttctcacgttgaatatgacaccccgactcgccactacgcacacgtagactgcccaggccacgccgactatgttaaaaacatgatcaccggtgctgcgcagatggacggcgcgatcctggttgttgctgcgactgacggccctatgcctcagactcgtgagcacatcctgctgggtcgtcaggttggcgttccttacatcatcgtattcctgaacaaatgcgacatggttgatgatgaagagctgctggagctggtagaaatggaagttcgtgaacttctgtctcagtacgacttcccaggcaatgatactccaatcatccgtggttctgctctgaaagcgctggaaggcgaagctgagtgggaagctaagatcgtagaactggctgaaactctggattcttacatcccagaaccagaacgtgctatcgacaagccattcctgctgccaatcgaagacgtattctcaatctctggccgtggtactgttgttaccggtcgtgtagagcgcggtatcgttaaagttggtgaagaagttgagattgttggtatcaaagataccgttaaatcaacttgtaccggcgttgaaatgttccgtaaactgctggacgaaggtcgtgcaggcgagaacgttggtgttctgctgcgtggtatcaagcgtgaagacatcgaacgtggtcaggttctggctaaaccaggttctatcaaaccacacaccaagttcgaatcagaagtttatattctgagcaaagatgaaggcggccgtcatactccgttcttcaaaggctaccgtccacagttctacttccgtacaactgacgtgaccggtaccatcgaactgccagaaggcgtggaaatggtaatgccaggcgataacatcaaaatgatcgttaccctgatccacccaatcgcaatggacgatggt

SEQ ID NO: 1843 - DNA, 1129 bp, Budvicia aquatica ATCC 35567
gtgtctaaagaaaaatttgaacgtacaaaaccgcacgttaacgttggtactatcggccacgttgaccacggtaaaacaactctgactgctgctatcaccagcgttttagctaaaacttatggcggtaacgctcgtgcattcgatcaaatcgataatgcaccagaagaaaaagcacgtggtatcaccatcaacacttctcacgttgagtatgatactcctgctcgccactacgcacacgtagactgcccaggacacgccgactatgtgaaaaacatgatcaccggtgctgctcaaatggacggcgcgatcttagttgttgcggcaactgatggtcctatgccacagactcgtgagcacatcctgttaggtcgtcaggttggcgttccttacatcatcgtgttcctgaacaagtgtgacatggttgatgacgaagaactgttagaattagttgaaatggaagttcgtgagcttctttctgcttatgatttccctggtgacgatactccagttgttcgtggttctgcgctgaaagcgttagaaggcgaagctgagtgggaagctaagatcattgaattagccggatatctggatagctacatcccagagccagagcgtgcgattgaccgtccgttcctgctgccaatcgaagacgtattctctatttcaggccgtggtacagttgttaccggtcgtgtagagcgcggaatcgttaaagtcggtgaagccgttgagattgttggtatcaaagataccgtacaaactacctgtactggcgttgaaatgttccgtaagttacttgacgaaggccgtgctggtgagaacgttggtgttctgctgcgtggtactaagcgtgaagaaatcgaacgcggtcaagtactggctaagccaggttcaatcaacccgcacaccaactttgtatcagaagtttatattctgagcaaagatgaaggtggtcgtcatactccattcttcaaaggctaccgtccacagttctacttccgtacaactgacgtgaccggtactatcgaactgccagaaggcgtagagatggtgatgcctggtgacaacattcagatgactgtaactctgattgcaccaatcgcgatggacgaaggtttacgcttcgcta

SEQ ID NO: 1844 - DNA, 810 bp, Abiotrophia adiacens ATCC 49175
atattcataatgcattacaagttgtgaaaacaacaagtgacggaagtgaaaagactgttacattggaaactgctgtagaattaggggatggtgcagttcgtacgattgccatggaatctacagatggtttgcaacgtggcatgaaagtagtggacttaggacgcacaattagcgttcctgtgggacctgaaacattaggtcgtgtattcaacgttttaggagatacaatcgacttgaaagaaccattcccagaagactttacaagacatgaaatccataaaccagcaccaaaatttgaagaattaaacagtcaatatgaaattctacaaacagggattaaagttattgaccttttagcaccttatcttaaaggtggtaaaatcggtttattcggtggtgccggtgtagggaaaaccgtattaattcaagaattaattcataatatcgctgaagaacttggtggtatttcagtatttacaggggtaggggaacgtactcgtgaagggaatgacctttaccatgaaatgcaagaatcaggcgtatctgctaaaacagcgatggtgtttgggcaaatgaacgaaccaccaggagctcgtatgcgtgtagcactaacagggttaactattgcggaatacttccgtgatatggaaaaacaagacgtgcttttattcatcgataacatttatcgtttcacgcaagcaggttcagaagtgtcagcgttacttggtcgtatgccttctgccgtagggtatcaaccaacattagcgacagaaatgggtcaattacaagaacgtatcagttcaactaaag

SEQ ID NO: 1845 - DNA, 815 bp, Arcanobacterium haemolyticum ATCC 9345
tgctctgccagaaattaacaacgccctcctcaccgaagtagacctctccggccaaggcgaaggcgaaagcgttctcaagatgactcttgaggttgctcagcacctcggcgataacatcgtccgtaccatcgccatgaagccaaccgacggtctggttcgcggcgccaccgttatcgataccggcgccccaatcaccgtgccagttggcgacgcaactaaaggtcatgttttcaacgtgaccggtgatgtcctaaacttgggcgaaggcgaaacccttgacgtcaaggaacggtggccaatccaccgcaaggctccacagttcgacgaactcgaaccggaaaccaagatgttcgaaacaggcatcaaggtgatcgatctcctcaccccatacgtacagggcggcaagatcggtctgtttggcggtgctggtgttggtaagaccgttcttatccaggaaatgatccagcgtgttgcacaggatcatggcggtgtgtccgtgttcgcgggtgtgggtgaacgtacccgtgaaggtaacgatcttatccacgaaatggaagatgcgggcgttcttgataagaccgcgcttgtgttcggccagatggatgaaccgccaggggttcgtttgcgtattgcactttccggcctgaccatggcggaatacttccgtgacgtgcaaaaccaggacgtgcttttgttcatcgataacatcttccgcttcacccaggcaggttcggaagtgtccacgttgcttggccgtatgccatcagcagtgggctaccagccgaccttggcagatkaaatgggcgcattgcagg

SEQ ID NO: 1846 - DNA, 1073 bp, Basidiobolus ranarum ATCC 24670
accttcctcctatcttgaahgccctggaggtccaaaaccacagctctcgyttagttttagaggtgtcccagcatttgggtgaaaacaccgttcgtactattgctatggacggtactgaaggattggttcgtggtcaaaatgtcgtagataccggatatcctattagagttcctgtcggtcctgaatgtttgggtcgtatcatgaacgttattggcgagcctgttgatgagcgcggycctatcaagaccaagaagcttgcacccatccacgcttctccccccgagttcgtygaccaatccaccacccccgaaatcttggagactggtattaaggttgtcgatttgttggccccttacgctcgtggtggtaagatcggtcttttcggtggtgccggtgtcggtaagactgtgtttatccaggagttgatyaacaacgttgccaaggcccacggtggttactccgtgttcgctggtgttggtgagcgtactcgtgagggtaacgatttgtaccacgagatgattcaaactggtgtcatcaagcttgatggccaatccaaggctgcccttgtctacggmcaaatgaacgagcccccaggtgctcgtgcccgmgtcgctttgaccggtcttaccgttgctgaatacttccgtgatgaggaagghcaagatgtgttgctcttcattgacaacattttccgtttcacccaagctggttctgaagtgtcygccttgttgggtcgtatcccctccgctgtcggttaccaacccaccttggccaccgatatgggtgtcatgcaagagcgtattaccaccaccaagaagggttccattacctctgtccaggccatttacgtccctgctgatgatttgaccgatcccgctcctgccactacttttgcccatcttgacgccaccaccgtgttgtctcgttccatctctgagttgggtatttaccccgctgtcgatcccctcgactccaagtctcgtatgttggatccycgtattgtcggtgaagagcactacgacatcgccactggtgttcagaagattctccartcttacaagtctctccaggat

SEQ ID NO: 1847 - DNA, 480 bp, Blastomyces dermatitidis ATCC 56220
tgtctttatccaggagttgattgtacgtcttgcctcaccctttgggtattttgcgaatactaattatagtagaacaacattgccaaggctcacggtggttactctgtcttcactggtgtcggtgaacgtactcgtgagggtaacgatttgtaccacgaaatgcaggaaactggtgtcattcagctcgagggtgaatccaaggtcgccctcgtgttcggtcagatgaacgagccccctggtgcccgtgcccgtgtcgctcttactggtttgaccattgccgagtacttccgtgacgaggagggtcaagatgtgcttctcttcattgacaacattttccgtttcactcaggccggttctgaggtgtctgcccttttgggtcgtatcccctctgccgtcggttaccagcccactctcgccgtcgacatgggtgtcatgcaggagcgtattaccaccaccaccaagggttccatcacctccgtc

SEQ ID NO: 1848 - DNA, 566 bp, Blastomyces dermatitidis ATCC 14112
tgtcttcattcaggagttgattgtacgtcccttcctctctacaaatgacgggcgaggaaaatttttggctttttctaatagctcgttatagaacaacattgccaaagcccacggtggttactccgttttcactggtgtcggcgagcggacccgtgaaggaaacgatttgtaccacgagatgcaggaaacccgtgttatccagctcgatggcgagtctaaggtcgcactcgtcttcggtcagatgaacgagccccccggagcccgtgcccgtgttgccctcactggcctgaccattgctgaatatttccgtgacgaggaaggtcaagacggtatgtattcatataaattactccgggcaaattgactcagaaccgcactcactcacacatatattagtgcttctctttatcgacaacattttccgcttcacccaggccggttccgaagtgtccgccctgcttggtcgtattccctccgccgtcggttaccaacccactctcgccgtcgacatgggtggtatgcaggaacgtatcacaaccaccaccaagggctccattacctycgtg

SEQ ID NO: 1849 - DNA, 817 bp, Campylobacter coli ATCC 43479
aatgaagccattgttgtaaattttgaaagtgaaggcaaaaaacaaaaacttgttttagaagtagcagcacacttgggcgataatagagttagaactattgctatggatatgacagatggcttggtaagaggacttaaagcagaagctttgggtgctcctattagcgttcctgtgggtgaaaaagttttaggaagaatttttaatgttacgggagatttgatcgatgaaggtgaagaaatttcttttgataaaaaatgggcaattcatagagatccaccagcttttgaagatcaaagcacaaaaagtgagatttttgaaacagggattaaagttgtggatttacttgctccttatgcaaaaggtggtaaagtaggtctttttggtggtgcaggtgttggtaaaactgttattattatggagcttattcacaatgttgcatttaaacatagcggctattctgtatttgcaggtgtaggtgagagaactcgtgaaggaaatgacctttataatgaaatgaaagaaagtaatgttttagacaaagttgctctatgttatggacaaatgaatgaaccaccaggggcaagaaatcgtattgctttaacaggtttaacaatggctgagtattttagagatgaaatgggtcttgatgtgcttatgtttattgataatatctttagattttcacaatcaggttctgaaatgtcagcacttttaggaagaattccatcagctgtgggttatcaaccaaccctagcaagtgaaatgggtaaattccaagaaagaattacttcaactaaaaaaggatcaattacttcag

SEQ ID NO: 1850 - DNA, 775 bp, Campylobacter fetus subsp. fetus ATCC 25936
aaggcaacacgcataaacttattttagagactgctgcacaccttggagataatcgtgtaagaactatcgctatggatatgagcgaaggacttacaagagggttagatgctatagcgcttgggtcgcctatcagtgttcctgttggagaaaaagttttaggaagaatattcaacgtaattggtgatcttatagacgaaggcgaagaagaaaaatttgataaaaaatggtcgattcatagagatccgccggcatttgaagatcaaagcacaaaaagtgaaatttttgaaacaggtataaaagtcgtagatcttttggctccttatgcaaaaggcggtaaagttggactatttggcggtgccggcgttggtaaaacagttatcattatggaacttatccacaacgttgcattcaaacacagcggctattcggtatttgccggtgtcggtgaaagaacaagagagggtaacgatctttataatgaaatgaaagaatccggcgttttggataaagttgccttatgttatggacaaatgaatgaaccgccgggtgcaagaaaccgtatagcgcttactggtcttacaatggctgagtattttcgtgacgagatgggactagatgttcttatgtttatcgataacatcttccgtttctcacaatcaggctcagagatgtcggctcttcttggacgtatcccaagtgcggttggttatcaaccaacgttagctagcgaaatgggaagacttcaagaaagaatcacatcaactaaaaaaggttc

SEQ ID NO: 1851 - DNA, 793 bp, Campylobacter fetus subsp. venerealis ATCC 33561
cgaagctattgaagtaaattttacagtagaaggcaacacgcataaacttattttagagactgctgcacaccttggagataatcgtgtaagaactatcgctatggatatgagcgaaggacttacaagagggttagatgctatagcgcttgggtcgcctatcagtgttcctgttggagaaaaagttttaggaagaatattcaacgtaattggtgatcttatagacgaaggcgaagaagaaaaatttgataaaaaatggtcgattcatagagatccgccggcatttgaagatcaaagcacaaaaagtgaaatttttgaaacaggtataaaagtcgtagatcttttggctccttatgcaaaaggcggtaaagttggactatttggcggtgccggcgttggtaaaacagttatcattatggaacttatccacaacgttgcattcaaacacagcggctattcggtatttgccggtgtcggtgaaagaacaagagagggtaacgatctttataatgaaatgaaagaatccggcgttttggataaagttgccttatgttatggacaaatgaatgaaccgccgggtgcaagaaaccgtatagcgcttactggtcttacaatggctgagtattttcgtgacgagatgggactagatgttcttatgtttatcgataacatcttccgtttctcacaatcaggctcagagatgtcggctcttcttggacgtatcccaagtgcggttggttatcaaccaacgttagctagcgaaatgggaagacttcaagaaagaatcacatcaact

SEQ ID NO: 1852 - DNA, 825 bp, Campylobacter gracilis ATCC 33236
ggactatttaccgaagattaacgaagctatcgaggttaaatttgacgtcgagggcgctcatcgcaggctgatcctagaggtagccgcgcaccttggagacaatcgcgtccgcacgatcgctatggatatgagcgatggacttaggcgagggcttgaggccgtcgctttgggcgcgcctattacggtgcctgtgggcgagaaagttttgggtagaatttttaatgttacgggcgatctgatcgacgaaggcgaggatgaaaaatttgaaacccgctggtcgatccacagagatccgcctagctttgaaaatcaaagcacgaagagtgaaatttttgaaaccggcattaaggtagtcgatctgctcgccccttatgcaaagggcggtaaggtaggactattcggcggtgctggcgtcggtaagaccgtcatcatcatggaactgattcacaacgtcgctttcaaacacagcggctactccgtatttgcgggtgtcggcgagcgaacgagagagggaaacgacctttataacgagatgaaagaatcgggcgttttggataaagtcgccttgacctatggtcagatgaacgaaccgccgggagcgagaaaccgtatcgcgctaaccggtcttacgatggccgagtatttccgcgacgagctagggcttgacgttttgatgtttattgataatatcttccgcttctcgcagtcgggttcggagatgtccgcgcttttaggacgaattccgtccgcggtcggttatcagcctacgcttgccagcgaaatgggtaaattacaggagcgcattacttctactaagaagggctc

SEQ ID NO: 1853 - DNA, 818 bp, Campylobacter jejuni subsp. jejuni ATCC 33560
tttacctcaaattaatgaagcaattgttgtaaattttgaaagcgaaggaaaaaaacataaacttgttttagaagtagcagctcatttaggagataatagagttagaactattgctatggatatgacagatggtttggtaaggggcttaaaagctgaggctttaggtgctcctattagtgttcctgttggtgagaaagttttaggaagaattttcaatgttactggagatttgatcgatgaaggtgaagaaatttcttttgataaaaaatgggcaattcatagagatccgccagcttttgaagatcaaagcacaaaaagtgagatttttgaaacagggattaaagttgtagatttgcttgctccttatgcaaaaggtggtaaagtaggtctttttggtggtgcaggtgttggtaaaactgttattattatggagcttattcacaatgttgcatttaagcatagcggctattctgtatttgcaggtgtgggtgagagaactcgtgaaggaaatgacctttataatgaaatgaaagaaagtaatgttttagacaaagttgctctatgttatggacaaatgaatgaaccaccaggagcaagaaatcgtattgctttaacaggtttaacaatggctgagtattttagagatgaaatgggtcttgatgtgcttatgtttattgataatatctttagattttcacaatcaggttctgaaatgtcagcacttttaggaagaattccatcagctgtgggttatcaaccaaccctagcaagtgaaatgggtaaattccaagaaagaattacttcaactaaaaaaggct

SEQ ID NO: 1854 - DNA, 830 bp, Enterococcus cecorum ATCC 43198
attacctgatatcaacaacgccttattggtctataaaaatgatgaacaaaaaagtaaaattgtgctagaagctgccttagaattaggtgatggcatcattcgtacaattgccatggaatcaacggatggtttacaacgtgggatggaagttgtcgatactggtaaaccaatttcagttccagttggtaaagaaacgctaggacgtgtctttaacgttttaggggatacgattgatatgcaagaaccatttgcacaagatgcagatcgttctgcaattcataaagctgcaccaaaatttgaagacttaagtacaagtactgaaattttagaaacagggattaaagttatcgacttattagcaccatatttaaaaggtggtaaagtcggtctattcgggggtgccggagtaggtaaaaccgttttaatccaagaattaatccataatattgcacaagaacatggtgggatttctgtatttaccggtgttggtgaacgtacacgtgaaggaaatgacttgtatcatgaaatgcgtgattcaggagttattgaaaaaactgccatggtgtttggtcaaatgaacgaaccacctggagctcgtatgcgtgttgctttaactgggttaacgattgctgaatatttccgtgatgtagaaggacaagatgtgttgctatttattgataacatcttccgtttcactcaagcgggttctgaagtatcagccttgcttggtcgtatgccatctgccgtgggttatcaacctacattggctacagaaatgggtcaattacaagaacgtatcacttcaactaagaagggctctatcacttcta

SEQ ID NO: 1855 - DNA, 823 bp, Enterococcus columbae ATCC 51263
tctttaccagatatcaataatgcgcttattgtctataaaaatgatgaacaaaaaagtaaaatcgtgcttgaagctgctttagagctaggagatggcattattcgtacgattgcaatggaatcaactgatggattgcaacgtggaatggaagttttcgatacaggtaagccaatttcagtaccagtaggtcgtgaaacattaggtcgtgtatttaatgttttaggtgataccattgatacgcaagaagcttttcctgctgatgcgaatcgtgatgcgattcataaatcagctccagcttttgaagaattaagtacaagtactgaaatcctagaaacagggattaaagttatcgacttactagcaccatacttaaaaggtgggaaagttggtctattcggtggtgccggtgtaggtaaaaccgtattaattcaagaattaattcataatatcgcccaagaacatgggggtatttcagtatttaccggtgttggtgaacgtacacgtgaaggaaatgacttgtatcacgaaatgcgtgattcaggcgttatcgaaaaaactgctatggtgtttgggcaaatgaacgaaccacctggagcacgtatgcgtgttgcgctaactggactaactattgcggaatacttccgtgatgttgaaggccaagacgtattgctatttattgataatatcttccgttttactcaagcaggttctgaagtttctgccttacttggtcgtatgccttctgcggtaggttatcaacctactttggctactgaaatgggtcaattgcaagaacggattacatcaacgaagaaaggttcga

SEQ ID NO: 1856 - DNA, 826 bp, Enterococcus dispar ATCC 51266
ttaccagacattaataatgccttggttgtctataaaaatgacgaacaaaaaaccaagattgtattagaagctgccttagaactaggagatggtgtgattcgaactatcgccatggaatctactgatggcttacaacggggaatggaagttgtcgatactggcagttccatttctgtaccggtaggaaaagaaacattgggtcgtgtatttaacgttttaggaaatacaattgacttagaagaaccttttccagcggatgctaaacgtagtggtatccataaaaaagcgcctgattttgatgaattaagcactagtacagaaattttagaaacagggattaaagttattgacctattagccccttatttaaaaggtggtaaagtcggattattcggtggtgccggagttggtaaaaccgttttaattcaagaattaattcataatattgcccaagaacatggtgggatttctgtttttactggtgttggtgaaagaacacgtgaaggtaatgacttgtattatgaaatgaaagaatctggcgttatcgaaaaaactgccatggtatttggtcaaatgaatgagccacctggtgcccggatgcgggttgctttaaccggacttaccattgcggaatacttccgggacgttgaaggacaagatgtattgctctttatcgataatattttccgttttacccaagctggttcagaagtatctgccttattaggacggatgccctctgccgttggttatcaaccaactttggctactgaaatgggacaacttcaagaacggattacctcaacgaaaaaaggttctattacat

SEQ ID NO: 1857 - DNA, 814 bp, Enterococcus malodoratus ATCC 43197
tccttaccagacatcaacaatgcgttgattgtttacaaaaaaaataaaacaaaagttgttcttgaagctgctttggaacttggtgatggtgttatccgcacgatctctatggaatcaacagatggcttgcaacgtggaatggaagttgtcgatacaggcaaaccaatctcagttcccgttggtaaagaaactttaggtcgtgtgtttaacgtattaggtgaaacaatcgacaaagaagcgccttttccagaagatgcagtaaaaagcggtattcataaaaaagcgccggcttttgaagaacttagtaccagtaatgaaattttagaaacagggatcaaagttatcgacttattagctccttacttaaagggtggtaaagtcggactatttggtggtgccggtgttggtaaaaccgtcttgatccaagaattgattcataatatcgcccaagaacacggtggtatttcagtgtttacgggtgttggtgaacgtactcgtgaagggaacgacctttattatgaaatgaaggaatcaggcgttattgagaaaactgccatggtgtttggacaaatgaacgagccgccaggtgcgcgtatgcgtgttgccttgactggtttgacattggctgaatatttccgagatgaagaaggacaagatgtgctgttgtttatcgacaacatcttccgtttcactcaagccggttctgaagtttctgccttgcttggccggatgccttcagccgttggctaccaaccaactttggcaactgaaatgggtcaattgcaagaacgaatcacttcaacgaagaagggct

SEQ ID NO: 1858 - DNA, 791 bp, Enterococcus mundtii ATCC 43186
cgcattagttgtttataaaaatgatgagcaaaaatcaaaagttgttcttgaagcagcattagaattaggtgacggtgtgatccgtacgatcgcaatggaatcgacggatggactacaacgtggaatggaagtcatcgacacaagcaaagcgatctctgtaccagttggaacagaaacattaggtcgtgtgttcaacgtgttaggtgaaacaatcgatttggaagcaccatttccagaggatgcccaaagaagcgagatccacaagaaagcaccaaattttgatgaattaagcacaagtacagagattcttgaaactgggatcaaagtcattgacttattagcaccttatttaaaaggtgggaaagttggattgtttgggggtgccggtgttggtaaaaccgtactgatccaagaattgatccataatatcgcccaagaacatgggggaatctcagtgtttaccggtgtaggggaacgtacccgtgaaggaaacgatctgtattacgaaatgaaagattcaggcgtaatcgaaaaaacagcgatggtgtttggacaaatgaatgagccaccaggtgctcgtatgcgtgtcgcactaactggattgacgattgcggaatatttccgtgatgtcgaaggacaagacgtgctcttatttattgataatattttccgtttcacccaagcaggttcagaagtatctgccttactaggacgtatgccatcagcggttggttatcaaccaaccttagcgactgaaatgggacaactccaagaacggatcacttcaacga

SEQ ID NO: 1859 - DNA, 817 bp, Enterococcus raffinosus ATCC 49427
tccttaccagacatcaacaatgcgttgattgtttataaaaaagataaaacaaaagttgttcttgaagctgctttggaacttggtgatggtgttattcgcacaatcgccatggaatcaacggatggattacaacgtggaatggaagttgtcgatactggcaagcctatttctgttccagtaggaaaagaaactctaggtcgtgtatttaatgtattaggtgaaacaatcgacaaggaagcgccttttccagaagatgcagaaaaaagtggtattcacaagaaagcaccaactttcgaagaacttagcacaagtaatgagatcttagaaacaggaatcaaagttattgacttgttagctccttacttaaaaggtggtaaagttggattatttggtggtgccggtgttggtaaaacagtcttgattcaagagctaattcataatatcgctcaagaacatggtggtatttctgtgtttactggtgttggtgaacgtactcgtgaagggaacgacctttattatgaaatgaaagattctggtgttattgagaaaactgctatggtgttcggtcaaatgaacgagccgccaggtgcacgtatgcgtgttgccttaactggtttaaccttagccgaatacttccgtgatgaagaaggacaagatgtgttgctatttattgacaacattttccgtttcactcaagccggatcagaagtttctgccttacttggccgtatgccgtcagcagttggttaccaaccgactttagcaactgaaatgggtcaattacaagaacgtattacgtcgacgaaaaaaggttcaa

SEQ ID NO: 1860 - DNA, 852 bp, Globicatella sanguis ATCC 51173
cctgacattcataatgcattaattgtaacgaacgctgatatggcggatgtaatgcaagaaaatatttcggatgaagaaaaattattaaccttagaagttgcactggatttaggtcatggaatggtccggacaattgcgatggaatcaaccgatggtttggaacgcggcatgacagttgtggattatttaacaccgattaaagtgccagtaggcgaagccactttaggtagagtattcaatgttttaggtgagacaattgatgaactagaaccggttggcgacgatgttgaactcaaaagtattcatcgtgaagcccctaaatatgaggacttagataatagttttcatgttttagaaaccggaattaaggtcatcgatttattagctccttatattaaagggggaaaaatcggtttattcggtggtgccggagtgggtaaaacggtcttaattcaagaattaattcataatattgcagaacaattaggaggtatctcagttttcactggggttggagaacgtacccgtgaagggaatgacctcgtttttgaaatgcgagagtcaggtgtaagcaagaagacggccatggttttcggtcaaatgaatgaaccacctggagcacgtatgcgtgttgtcttaacaggacttacaatggcggaatatttccgtgacgaattgaaacaagacgtcttattatttattgataatatttatcgttttactcaagcaggttccgaagtgtcagccttattaggtcgtatgccttcagcagtagggtatcaaccaactttagcaagtgaaatgggacaaatgcaagaacgtattacgtcwacgaagcrcggttccattaca

SEQ ID NO: 1861 - DNA, 828 bp, Lactococcus garvieae ATCC 49156
gcgcgactcttcctgagattaataacgcactcatcgtttacaaagatgtagacggcgttaaaactaaaatcgtccttgaagtggcgttggaacttggtgatggtgccgtacgtaccatcgctatggaatcaactgatggcttgacacgtggacttgaagttctcgatacaggtaaagcaatcagcgtacctgttggtcaagaaacacttggacgtgtcttcaatgtacttggagatgctattgatggaggggaagcatttgctgaaaatgcagaacgcagccctatccataaaaaagccccatcttttgatgaactttcaacagcaaatgaaattctggtgacagggattaaagttattgacttgcttgccccataccttaaaggtggtaagattgggttgttcggtggtgccggagttggtaaaaccgtccttatccaagagttgattcacaatattgcccaagaacacggtggtatttccgtatttactggtgttggggaacgtacacgtgaagggaatgacctttactgggaaatgaaagaatcaggcgttatcgaaaaaacagccatggtcttcggtcaaatgaatgaaccacctggagcacgtatgcgtgttgctcttactggtttgacaattgctgaatatttccgtgatgtagaaaaacaagacgttttgcttttcattgataatatcttccgtttcacccaagccggttcagaagtatctgccctcttaggacgtatgccatcagccgttggttaccaacctacgcttgcaactgaaatgggtcaacttcaagaacgtatcacttcaacaaaacaaggtt

SEQ ID NO: 1862 - DNA, 828 bp, Lactococcus lactis ATCC 11454
aattgcctgarattaacaatgccttgattgtctacaaagatgtcaatggcctaaaaacaaaaattactcttgaagttgctttggaacttggtgatggtgcagttcgtacaatcgctatggaatctactgatggcttgactcgtggacttgaagtccttgatacaggtaaagcagtcagcgttcctgttggggaagccactcttggtcgtgtttttaacgttcttggtgatgttattgacggtggggaagaatttgctgctgatgcagaacgtaatcctatccataaaaaagctccaacatttgacgaattgtcaactgcaaacgaagttctcgtaactgggattaaagttgtcgatttgcttgcaccttaccttaaaggtggtaaagttggacttttcggtggtgccggagttggtaaaaccgtccttattcaagaattgattcacaacatcgcccaagaacacggaggtatttctgtgtttaccggtgttggggaacgtactcgtgaagggaatgacctttactgggaaatgaaagaatcaggcgttattgaaaaaactgccatggtctttggtcaaatgaatgaaccaccaggagcacgtatgcgtgttgcccttactggtttgacaattgctgaatatttccgtgatgttcaaggtcaagacgtactgcttttcattgacaacatcttccgtttcacacaagctggttcagaagtttctgcccttttgggacgtatgccttctgccgttggttaccaaccaacacttgctactgaaatggggcaattgcaagaacgtatcacttctactaagaagggttctgtta

SEQ ID NO: 1863 - DNA, 825 bp, Listeria ivanovii ATCC 19119
cttacctgaaatctacaacgccctagttattgaatataaatctgatgcagaagaagcaccaactagccaacttactttagaagtagccattcaattaggtgatgacgttgttcgtacaattgcaatggcatcaactgatggtgttcaaagaggtatggaagttattgatactgggagcccaatcacagttccagttggtacagtaacacttggtcgtgtatttaacgtattaggaaacactatcgatttggatgagccacttccaagcgatatcaagcgtaataaaattcaccgtgaagcaccaacatttgaccaattagcaacaactactgaaattcttgaaacaggaataaaagttgtagacttgctagccccatatttaaaaggtggtaaaattggtttgttcggcggagcgggtgttggtaaaaccgttttaatccaagaacttattcataatatcgctcaagaacatggtggtatttctgtgttcgctggtgttggagaacgtactcgtgaagggaacgatctttactttgaaatgaaagactctggtgtaattgaaaaaactgccatggtattcggtcaaatgaacgaaccaccaggtgctcgtatgcgtgtagctttaacaggtcttacaatcgctgaatatttccgtgatgaagaacaccaagatgtacttctattcattgataatattttccgctttactcaagctggttcagaggtttcggctttactaggtcgtatgccatctgcagtaggttatcaaccaactctagctaccgaaatgggacaattacaagaacgtattacttctactaatgt

SEQ ID NO: 1864 - DNA, 821 bp, Succinivibrio dextrinosolvens ATCC 19716
gtcatattccagagctttatgacgctctggaggttaagggcgatggtaagcatcgttcagacctagttcttgaggttcaacagcagattggcggtggtgtggtacgctgcattgccatgggttcttctgacggtttgagcagaggaattgaggctgtaaatactggtgccggtgttaaggttccagttggtcgtgagaccctaggacgtattatgaacgttttaggtcagcctgtagatgagagaggtcctatcggacagaaagaggattgggaaattcaccgtccagctcctacctatgctgagcagtcatcaactacagaaattctagaaaccggtattaaggttatggaccttatctgcccatttgctaagggtggtaaagttggtctgttcggtggtgccggtgtgggtaagacagttaacatgatggagcttatcaataacattgctaaggctcactcaggtctatctgtatttaccggtgttggtgagcgtactcgtgagggtaacgacttctaccacgaaatgcaggaatcaaaggttatcgataaggtatcaatgatttacggtcagatgaacgagcctccagggaaccgtctacgtgttgctctgacaggtctgactgttgctgagaagttccgtgacgaaggtctggatgtgcttctgttcatcgataacatctatcgttatacactggctggtacagaggtatctgctctgttaggccgtatgccttcagctgtgggttaccagcctacactggctgaggaaatgggtgtattacaggagcgtattgcttcaactaagaaaggttctatt

SEQ ID NO: 1865 - DNA, 822 bp, Tetragenococcus halophilus ATCC 33315
tgatactttaccagatatcaataatgcattagccgtatataaaaatgatgagaacaagacgcgtgttgtattggaagctactttagaacttggagatggggtaattcgtgccatttctatggggtctactgacggcttgcaacgtggcatggaagttgtggatacacaagaacctatttctgttccggtaggaaatgatactttaggtcgtgtatttaatgtgttaggagaaacaatagataatcaggagccatttcctgaagatgctgaaaaaagtggtattcacaaaaaagcccctagttttgatgaattaagtactagttcggaaatattagaaacagggatcaaagtgattgatttattagaaccttatctaagaggcggtaaagtcggattgtttggaggcgccggtgttggaaaaacggtgctaattcaagaattgatcaataatgttgcccaagaacacgggggtatttccgtgtttaatggtgtaggtgaacgtactcgtgaaggtaatgacttgtattatgaaatgcaggattcaggcgttatcgaaaaaacagccatggtgtttggtcaaatgaacgaaccaccaggtgctcgtatgcgtgttgctttaactggcctaacactggcagaatattttcgagatgttgaaggtcaagacgtattattatttattgataatattttccgttttacacaagcaggtaccgaagtttccgctttacttggtagaatgccatctgctgttggctatcaacccacactagcaactgaaatggggcaactgcaagaacggattacgtcaacggataaggg

SEQ ID NO: 1866 - DNA, 818 bp, Campylobacter fetus subsp. fetus ATCC 25936
atctcctcaggatckataggacttgatatagctcttggtataggcggcgtaccaaaaggaagaatagtcgaaatttatgggccagaaagctctggtaaaacaactcttactttgcatttaatagcagaatctcaaaaagtcggcggagtttgcgcgtttgtagatgcagagcatgcacttgatgttaaatatgctaaaaatttaggcgttgatacggataacttatatatttctcaaccggacttcggagagcaagctcttgatatagtagaaactctagctagaagcggcgccgttgatcttatagtaatagatagcgtagcagctytaacaccaaaaagcgaaatagaaggcgatatgggagatcagcacgtagggctgcaagcaagactcatgagtcaagcacttagaaaattaaccggagttgtccataaaatgggaactacagttgtatttataaaccaaattcgtatgaaaatcggcgctatgggctatggcactcctgaaactactactggcggaaatgcgcttaaattttacgcttcagttagacttgacgtacgtaaaatagctactttaaaacagagcgatgagccaatcggaaaccgcgtaaaagtaaaagtagtaaaaaacaaagtcgctcctccttttagacaagccgaatttgatatcatgtttggagaaggtatcagcaaagaaggagagataatagattacggcgtaaaacttgatattatcgataaaagcggcgcttggtttagctatgataattcaaaattaggtcaaggcagagaaaactcaaaagcgtttttaaaaga

SEQ ID NO: 1867 - DNA, 814 bp, Campylobacter fetus subsp. venerealis ATCC 33561
tctcctcaggatckataggacttgatatagctcttggtataggcggcgtaccaaaaggaagaatagtcgaaatttatgggccagaaagctctggtaaaacaactcttactttgcatttaatagcagaatctcaaaaagtcggcggagtttgcgcgtttgtagatgcagagcatgcacttgatgttaaatatgctaaaaatttaggcgttgatacggataacttatatatttctcaaccggacttcggagagcaagctcttgatatagtagaaactctagctagaagcggcgccgttgatcttatagtaatagatagcgtagcagctytaacaccaaaaagcgaaatagaaggcgatatgggagatcagcacgtagggctgcaagcaagactcatgagtcaagcacttagaaaattaaccggagttgtccataaaatgggaactacagttgtatttataaaccaaattcgtatgaaaatcggcgctatgggctatggcactcctgaaactactactggcggaaatgcgcttaaattttacgcttcagttagacttgacgtacgtaaaatagctactttaaaacagagcgatgagccaatcggaaaccgcgtaaaagtaaaagtagtaaaaaacaaagtcgctcctccttttagacaagccgaatttgatatcatgtttggagaaggtatcagcaaagaaggagagataatagattacggcgtaaaacttgatattatcgataaaagcggcgcttggtttagctatgataattcaaaattaggtcaaggcagagaaaactcaaaagcgtttttaaa

SEQ ID NO: 1868 - DNA, 824 bp, Campylobacter jejuni subsp. jejuni ATCC 33560
gatagcataggcwcaggttcagttggacttgatcttgctttaggtataggcggtgttccaaaaggaagaattatagaaatttatgggcctgaaagttcaggtaaaactactctaactctacacattatcgcagaatgccaaaaagcaggtggggtttgtgcttttatcgatgcagaacatgcacttgatgtgaaatatgctaaaaatttaggtgtaaatacagatgatttgtatgtttctcaacctgattttggagagcaagccttagaaattgtagaaactatagcwagaagtggtgcagtagatcttatwgtagtagatagcgttgcagcwcttaccccaaaagcagaaattgaaggcgatatgggcgatcarcatgtaggacttcaagcaagacttatgtctcaagctctaagaaaacttacaggtatagttcataaaatgaataccacagtaattttcatcaaccaaattcgtatgaaaatcggtgctatgggttatggtactcctgaaaccacaacaggtggaaatgcattaaaattttatgcttctgtgcgtttagatgttagaaaagtagcaaccttaaamcaaaacgwagamcctataggaaaccgcgttaaagtaaaagtagttaaaaataaagttgctcctccattcagmcaagctgaatttgatgtgatgtttggagagggtttaagccgtgaaggtgaattgatcgattatggtgtaaaacttgatatcgtagataaaagtggtgcgtggttttcttataaagataaaaaacttggacaaggtagagaaaattcaaaagctttcttaaaaga

SEQ ID NO: 1869 - DNA, 388 bp, Enterococcus avium ATCC 14025
agaaagttctggtaaaacaacggttgcactgcatgcgattgcagaagttcaaaaacatggcgggacggcagcctttattgatgccgagcacgcgttggaccctcaatacgcacaacgtctaggtgtaaacattgatgaattgctgctatcacaaccagatactggggaacaaggcttagaaattgcagatgctttagtttcaagtggcgcagtcgatattatcgttattgactcggtggccgcgctagtcccccgtgctgaaatcgatggcgagatgggtgatgcgcacgttggtctgcaggctcgtttgatgtcacaagcattgcgcaagctgtcaggctctatcaacaaaacaaagactatcgccgtctttattaaccaaattcgt

SEQ ID NO: 1870 - DNA, 388 bp, Enterococcus faecium ATCC 19434
tgaaagttcaggtaaaacaacagttgcactacacgctattgcagaagtacaaaaaaatggcggaacggccgctttcattgatgctgagcatgcgttagatccgcaatatgcacaaaaattaggtgtgaatatcgatgaactacttctttcacagcctgacacaggagaacaaggtctagagatcgctgatgctttagtatcaagtggggctgtagatatcgtagtagtcgattcagttgctgctttagttccacgagcagaaatcgacggcgaaatgggtgactcacatgtcgggttacaagcacgtttgatgtctcaagcattgcgtaaactctctggttcgatcaacaaaacaaaaacaatcgctattttcatcaaccaaatccgt

SEQ ID NO: 1871 - DNA, 388 bp, Listeria monocytogenes ATCC 15313
agagagttccggtaaaacaactgttgcgcttcatgcaattgcggaagtacaagcacaaggcggaacagcagcatttatcgatgctgagcatgcgttggatccggcttatgctaaaaacctaggtgtaaatattgatgaattattactatctcaaccagatacaggagaacaagctttagagattgctgaagctttagttagaagtggtgcagttgatatgttagtaattgactccgttgcagcacttgtaccacgtgctgaaatcgaaggcgagatgggcgatgctcatgttggattacaagcacgtttaatgtcccaagcattgcgtaaactttctggtgttattaataaatcaaaaaccattgctattttcattaaccaaattcgt

SEQ ID NO: 1872 - DNA, 388 bp, Streptococcus mitis ATCC 49456
agagtcatctggtaagacaacggttgcccttcatgcagttgcgcaagcacaaaaagaaggtggtattgctgcctttatcgatgcggaacatgcccttgatccagcttatgctgcggcccttggtgtcaacattgacgaattgctcttgtcacaaccagactcaggagagcaaggtcttgagattgcaggaaaattgattgactcaggagccgtggatcttgtcgtagtcgactcagttgcggcccttgtccctcgtgcggaaattgatggagatatcggtgatagccacgttggtttgcaggctcgtatgatgagccaggctatgcgtaaacttggtgcttctatcaataaaaccaaaacaattgccatctttatcaaccaattgcgt

SEQ ID NO: 1873 - DNA, 430 bp, Streptococcus oralis ATCC 35037
gaacatgacgccgactttttcacgcaattggttgataaagatggcaattgttttggttttattgatagaagctccgagtttacgcatggcctggctcatcattcgagcctgcaaaccaacgtgactgtctccaatatccccatcaatttccgcacgaggtacaagggccgcaactgagtcgataacgacaaggtcaactgcacctgagtcaatcaattttccagcaatttcaagaccttgttcacctgagtctggttgtgacaagagcaattcgtcaatattcacaccaagggctgcagcataggctgggtcaagagcatgttccgcatcgataaaggctgcaataccaccttctttctgtgcttgcgcaacagcgtgaagggcaaccgttgtcttaccagatgattctggcgcrtacayttcgatgata

SEQ ID NO: 1874 - DNA, 947 bp, Aspergillus fumigatus ATCC 64746
ttgtcgttgttgctgcctccgacggtcagatgtaggtggaacatcttgggaaatacgtcgtaaaacacgtcgcttacgttttcgcgaataggccccagactcgtgagcatttgctgctcgcccgccaggttggtgtccagaagatcgttgtcttcgtcaacaaaatcgatgctattgatgatccggagatgctggaactggtcgaactcgagatgcgtgagctgctgaacagctacggtttcgagggtgaagagactccgatcattttcggttccgctctctgtgctctcgaaggacgccgtgacgacatcggtaaagacagaattgagcagcttatgaacgctgtcgacacctggatccccactcctcagcgtgacctcgacaaacctttcttgatgtctgtcgaggaagtgttctctatcgccggccgtggtaccgtggcttctggtcgtgtcgagcgtggtatcttgaagaaggactctgaggttgagattgttggaggctccttcgaacccaagaagaccaaagtcaccgacattgaaaccttcaagaagagctgtgatgaatcgcgtgctggtgacaactctggtctcctcctgcgtggtatccgacgtgaagacgtcaagcgtggtatggtcattgctgttcccggcagcaccaaggctcacgacaagttcctcgtctccatgtacgtcctgaccgaggcggagggtggtcgtcgtactggcttcggtgccaactaccgtccccaagtcttcatccgtactgcaggtaagttcccgcacaccgtgtccagatcttccgagagattagcgatatatgctaatgattcatcagacgaggctgctgacctcagcttccctgacggcgaccaatctcgcagagttatgcctggtgacaacgtcgagatgatcctgaagacccaccaccctgttgctgctgaggct

SEQ ID NO: 1875 - DNA, 923 bp, Aspergillus versicolor strain WSA-175
gctgcttccgatggtcaaatgtacgtcaaccttatatacaccctctgatatgacagaatgtcgcctaacagcacgcgtgaactaggccccaaacccgtgagcacttgctgcttgcccgccaggtcggtgtccagaagattgttgtgttcgtcaacaaggttgatgccgtcgatgaccctgagatgttggaacttgttgagctggaaatgcgtgagcttctcagcacttacggcttcgaaggcgaggagacccctatcatcttcggttccgccctatgcgccctcgagggtcgccgccccgatatcggtactgagcgaattgacagccttcttgaggccgttgacacctggatccctacccctcagcgtgacctggacaagcctttcctgatgtctgtcgaggaggtcttctccattgccggtcgtggtaccgttgcctctggccgtgttgagcgtggtctccttaagaaggacagcgaggtcgagattctcggaggtggtcaggtcatgaagaccaaggtcactgacattgagacattcaagaagcactgtgacgaatcccgtgctggtgacaactccggtcttcttctccgtggtatccgccgtgaggatgtcaagcgcggtatggttattgctgctcccgcctctatcaaggcccacaagaagttcatggtctccatgtacgtcctcactgaggcagaaggtggccgtcgcagtggcttcggtgtcaactatcgtccccaggcttacattcgcactgctggtaagttttcaaaacattcgacctctcgccttagaagaagaatacctctaacttgtatttagacgaggcttgcgacctttctttccccgatggcgacatgagccgccgtgtcatgcctggtgacaacgtggaaatgatcctcaacctcaacaaccctgtcg

SEQ ID NO: 1876 - DNA, 807 bp, Basidiobolus ranarum ATCC 24670
catcattgttgtgtccgccactgatggtcaaatgcctcaaactcgtgagcatttgttgttggctcgccaagttggtgtccaacacttggttgtcttcatcaacaaggttgatgccgttgatgatcctgaaatgttggagttggtcgagatggaaatgcgtgatttgctttcccaatacggtttccccggagacaacgtccccattatccagggttccgctctctgcgctcttgaggaccgcaaccccgagatcggccgtaacgccatcatgaagttgatggaggctgttgatagcagcatccccacccctgcccgtgatttggacaaacctttcctcatgcccgttgaagatgtgttctccatctctggccgtggtactgttgccactggacgtgttgagcgtggtatggtcaccaagggtactgaagttgaaatcgtcggtatgggcgagcacttcaagaccaccttgaccggtattgaaatgttccacaaggaattggacaagggtatggctggtgacaacatgggttgcttgcttcgtggtgtcaagcgtgagcaagtccgtcgtggtatggttatctgtgcccccggatccgtcaagccacataagaagttcatggctcagctctacattctcaccaaggatgagggaggccgccacactcccttcgtcaacaactaccgcccacaaatgttcttcagaactgttgatgttaccgccatccttaagcacccccctggtacccccgatgctgatgagaagatggtcatgcccggagacaacgttcaactcgagtgcgagctctt

SEQ ID NO: 1877 - DNA, 806 bp, Campylobacter gracilis ATCC 33236
agttgtttctgctgcggatggtcctatgcctcaaactcgcgagcatatcttgctttctcgtcaagtaggcgttccatacatcgtagttttcctaaacaaaaccgatatggtcgatgatccggatcttttagagttagttgaagaggaagttagagatcttttaaaagagtataaattccctggcgacgaaaccccaatcattaagggttctgctcttaaggctcttgaggaagctaaggccggacaagacggcgaatggtctgcaaagattatggagcttatggacgcggttgatagctatattccaactcctgttcgcgatactgataaagatttccttcttccgatcgaagatattttctcgatttccggtcgcggtaccgttgtaaccggtagaatcgaaaaaggtatcgttaaagttggtgatactatcgagatcgtaggtattaaacctactcagactactaccgtcactggcgttgagatgtttagaaaagagatggatcaaggtgaagccggcgataatgtaggtgttttattgcgcggtactaagaaagaggaagtagagcgcggtatggttttatgcaaaccaaaatcgatcactcctcatactaaatttgagggcgaggtttatatcctaactaaagaagaaggcggacgccatactccattctttaataattatagaccgcagttttacgttcgtacgacagatgttaccggttcgattactcttcctgaaggaaccgagatggttatgccgggcgacaacgttaaaatcaccgttgagctaatcgctccgatcg

SEQ ID NO: 1878 - DNA, 806 bp, Campylobacter jejuni subsp. jejuni ATCC 33292
gctgcagatggccctatgccacaaactagagagcacattcttctttctcgtcaagtaggcgttccatatattgttgtttttatgaataaagcagatatggttgatgatgctgaacttttagagttagttgaaatggaaattagagaattattaagctcttatgatttcccaggcgatgatacacctattatttctggttctgctttaaaagctcttgaagaagctaaagctggacaagatggtgaatggtcagcaaaaattatggatcttatggctgcagttgatagctatattccaactccaactcgtgatactgaaaaagacttcttgatgccaattgaagatgttttctcaatttcaggtcgtggtactgttgttacaggtagaattgaaaaaggtgttgtaaaagtaggtgatactatcgaaatcgttggtattaaagatactcaaacaacaactgtaacaggtgttgaaatgttcagaaaagaaatggatcaaggcgaagcaggagataacgtaggtgttcttcttcgtggtactaaaaaagaagaagttatccgtggtatggttcttgctaaaccaaaatcaattactccacacactgacttcgaagctgaagtttatatcttaaataaagatgaaggtggtagacatactccattctttaacaactatagaccacagttttatgtaagaacaactgatgttacaggttcgattaaattagctgatggtgttgaaatggttatgccaggtgaaaatgtgagaattactgtaagcttgatcgctccagtagcacttgaaga

SEQ ID NO: 1879 - DNA, 896 bp, Coccidioides immitis strain WSA-222
atgtatgcaaccgagagcactcccggatcttggtttaaatggcactaatataagacaggcctcaaactcgagagcatttacttctcgcccgtcagatcggtatccaaaaaatcgtcgtcttcgtgaacaaggttgatgccatcgaggacaaagagatgttggagcttgttgaattggagatgcgtgaactcctaaccagctacggtttcsagggtgaagaaactcccatcatttttggctctgctctctgtgccctcsaaggaagacaacccgagatcggtgttaccaagattgatgagctcttgcaggccgtcgacacctggattcccactcctcagcgtgagactgacaagcccttcttgatgtccattgaggaagtgttctctatttccggacgaggaaccgttgtctccggccgtgtggagcgtggtatcctcaagaaggactccgaagttgaaattgtcggcggttcgcccgagccaatcaaaaccaaggttaccgatatcgaaacctttaagaagtcttgcgacgagtctcgcgctggtgataactccggcttgctcctacgaggcgttaagcgtgaagatattagccgtggcatggtcgtcgctgtaccaggaagtgtcaaggcccatactgaattcttagtttcgctttacgtcctcaccgaagctgagggtgggcgcaaatctggattcagcagcaagtaccgcccacagatgttcattcgcactgccggtatgtaatactgtgataatttcgttgacatggtactgattgaattctatagacgaagcggctcagctcagctggcccggagaagatcaagacaagatggctatgccaggagacaatatcgaaatgatttgcaccaccttgcacccagttgccgccga

SEQ ID NO: 1880 - DNA, 798 bp, Erwinia amylovora ATCC 14976
ctggtagttgctgcgactgacggcccaatgcctcagacycgtgagcacatcctgctgggtcgccaggttggcgtgccatacatcatcgtgttcctgaacaaatgtgacatggttgatgatgaagagctgctggagctggttgaaatggaagtmcgtgacctgctgtcacagtacgacttcccaggcgacgacacgccaatcgtgcryggttctgcgctgaaagcgctggarggcgaagcagagtgggaagcgaagatcatcgaactggctggccatctggataactacatcccggaaccagagcgtgcgattgacaaaccgttcctgctgccaattgaagacgtgttctccatctctggccgtggtaccgttgttaccggtcgtgtagagcgcggtrtsgttaaagtgggtgaagaagttgaaatcgttggtatcaaagataccgtgaaatcaacctgtaccggcgttgagatgttccgtaagctgctggacgaaggccgtgcgggtgagaactgtggtatcctgctgcgcggtatcaagcgcgaagatatccagcgtggtcaggttctggcgaagccaggcaccatcaagccacacaccaagttcgagtcagaagtttatattctgtctaaagacgaaggcggccgtcatactccgttcttcaaaggctaccgtccacagttctacttccgtactactgacgtgaccgggactatcgaactgccagaaggcgttgagatggtgatgccaggcgacaacattcagatggttgtgaccctgatccacccgatcgccatg

SEQ ID NO: 1881 - DNA, 810 bp, Salmonella choleraesuis subsp. choleraesuis ATCC 14028
atcctggttgttgctgcgactgacggyccgatgccgcagacccgtgagcacatcctgctgggtcgtcaggtaggcgttccgtacatcatcgtgttcctgaacaaatgcgacatggttgatgacgaagagctgctggaactggttgaaatggaagttcgygaactgctgtctcagtacgacttcccgggcgacgacactccgatcgttcgtggttctgctctgaaagcgctggaaggcgacgcagagtgggaagcgaaaatcatcgaactggctggcttcctggattcttacatyccggaaccagagcgtgcgattgacaagccgttcctgctgccgatcgaagacgtattctccatctccggtcgtggtaccgttgttaccggtcgtgtagarcgcggtatcatcaaagtgggcgaagaagttgaaatcgttggtatcaaagagactcagaagtctacctgtactggcgttgaaatgttccgcaaactgctggacgaaggccgtgccggtgagaacgtaggtgttctgctgcgtggtatcaaacgtgaagaaatcgaacgtggtcaggtactggctaagccgggcaccatcaagccgcacaccaagttcgaatctgaagtgtacattctgtccaaagatgaaggcggccgtcatactccgttcttcaaaggctaccgtccgcagttctacttccgtactactgacgtgactggcaccatcgaactgccggaaggcgtagagatggtaatgccgggcgacaacatcaaaatggttgttaccctgatccacccgatcgcgatggacgacggt

SEQ ID NO: 1882 - DNA, 888 bp, Staphylococcus cohnii strain BM10711
atgaatttttatttagaggagtttaacttgtctattcccgattcaggtccatacggtataacttcatcagaagacggaaaggtatggttcacacaacataaggcaaacaaaatcagcagtctagatcagagtggtaggataaaagaattcgaagttcctacccctgatgctaaagtgatgtgtttaattgtatcttcacttggagacatatggtttacagagaatggtgcaaataaaatcggaaagctctcaaaaaaaggtggctttacagaatatccattgccacagccggattctggtccttacggaataacggaaggtctaaatggcgatatatggtttacccaattgaatggagatcgtataggaaagttgacagctgatgggactatttatgaatatgatttgccaaataagggatcttatcctgcttttattactttaggttcggataacgcactttggttcacggagaaccaaaataattctattggaaggattacaaatacagggaaattagaagaatatcctctaccaacaaatgcagcggctccagtgggtatcactagtggtaacgatggtgcactctggtttgtcgaaattatgggcaacaaaataggtcgaatcactacaactggtgagattagcgaatatgatattccaactccaaacgcacgtccacacgctataaccgcggggaaaaatagcgaaatatggtttactgaatggggggcaaatcaaatcggcagaattacaaacgacaaaacaattcaagaatatcaacttcaaacagaaaatgcggaacctcatggtattacctttggaaaagatggatccgtatggtttgcattaaaatgtaaaattgggaagctgaatttgaacgaatga

SEQ ID NO: 1883 - DNA, 23 bp, Artificial Sequence
  Synthetic DNA Sequence
agccgcttgagcaaattaaacta

SEQ ID NO: 1884 - DNA, 23 bp, Artificial Sequence
  Synthetic DNA Sequence
gtatcccgcagataaatcaccac

SEQ ID NO: 1885 - DNA, 21 bp, Artificial Sequence
  Synthetic DNA Sequence
agcgaaaaacaccttgccgac

SEQ ID NO: 1886 - DNA, 18 bp, Artificial Sequence
  Synthetic DNA Sequence
gacgcccgcgccaccact

SEQ ID NO: 1887 - DNA, 19 bp, Artificial Sequence
  Synthetic DNA Sequence
gacgcccgcgacaccacta

SEQ ID NO: 1888 - DNA, 19 bp, Artificial Sequence
  Synthetic DNA Sequence
gacgcccgcaacaccacta

SEQ ID NO: 1889 - DNA, 20 bp, Artificial Sequence
  Synthetic DNA Sequence
gttcgcaactgcagctgctg

SEQ ID NO: 1890 - DNA, 19 bp, Artificial Sequence
  Synthetic DNA Sequence
ttcgcaacggcagctgctg

SEQ ID NO: 1891 - DNA, 18 bp, Artificial Sequence
  Synthetic DNA Sequence
  modified_base (14): i
ccggagctgccgancggg

SEQ ID NO: 1892 - DNA, 18 bp, Artificial Sequence
  Synthetic DNA Sequence
cggagctgccaarcgggg

SEQ ID NO: 1893 - DNA, 18 bp, Artificial Sequence
  Synthetic DNA Sequence
ggagctggcgarcggggt

SEQ ID NO: 1894 - DNA, 18 bp, Artificial Sequence
  Synthetic DNA Sequence
gaccggagctagcgarcg

SEQ ID NO: 1895 - DNA, 19 bp, Artificial Sequence
  Synthetic DNA Sequence
cggagctagcaarcggggt

SEQ ID NO: 1896 - DNA, 21 bp, Artificial Sequence
  Synthetic DNA Sequence
gaaacggaactgaatgaggcg

SEQ ID NO: 1897 - DNA, 21 bp, Artificial Sequence
  Synthetic DNA Sequence
cattaccatgggcgataacag

SEQ ID NO: 1898 - DNA, 22 bp, Artificial Sequence
  Synthetic DNA Sequence
ccattaccatgagcgataacag

SEQ ID NO: 1899 - DNA, 861 bp, Klebsiella pneumoniae strain 15571
atgcgttatattcgcctgtgtattatctccctgttagccaccctgccgctggcggtacacgccagcccgcagccgcttgagcaaattaaactaagcgaaagccagctgtcgggccgcgtaggcatgatagaaatggatctggccagcggccgcacgctgaccgcctggcgcgccgatgaacgctttcccatgatgagcacctttaaagtagtgctctgcggcgcagtgctggcgcgggtggatgccggtgacgaacagctggagcgaaagatccactatcgccagcaggatctggtggactactcgccggtcagcgaaaaacaccttgccgacggcatgacggtcggcgaactctgcgccgccgccattaccatgagcgataacagcgccgccaatctgctactggccaccgtcggcggccccgcaggattgactgcctttttgcgccagatcggcgacaacgtcacccgccttgaccgctgggaaacggaactgaatgaggcgcttcccggcgacgcccgcgacaccactaccccggccagcatggccgcgaccctgcgcaagctgctgaccagccagcgtctgagcgcccgttcgcaacggcagctgctgcagtggatggtggacgatcgggtcgccggaccgttgatccgctccgtgctgccggcgggctggtttatcgccgataagaccggagctggcgagcggggtgcgcgcgggattgtcgccctgcttggcccgaataacaaagcagagcgcattgtggtgatttatctgcgggataccccggcgagcatggccgagcgaaatcagcaaatcgccgggatcggcgcggcgctgatcgagcactggcaacgctaa

SEQ ID NO: 1900 - DNA, 780 bp, Klebsiella pneumoniae strain SLK-47
ctgttagccaccctgccgctggcggtacacgccagcccgcagccgcttgagcaaattaaactaagcgaaagccagctgtcgggccgcgtaggcatgatagaaatggatctggccagcggccgcacgctgaccgcctggcgcgccgatgaacgctttcccatgatgagcacctttaaagtagtgctctgcggcgcagtgctggcgcgggtggatgccggtgacgaacagctggagcgaaagatccactatcgccagcaggatctggtggactactcgccggtcagcgaaaaacaccttgccgacggcatgacggtcggcgaactctgcgccgccgccattaccatgagcgataacagcgccgccaatctgctactggccaccgtcggcggccccgcaggattgactgcctttttgcgccagatcggcgacaacgtcacccgccttgaccgctgggaaacggaactgaatgaggcgcttcccggcgacgcccgcgccaccactaccccggccagcatggccgcgaccctgcgcaagctgctgaccagccagcgtctgagcgcccgttcgcaacggcagctgctgcagtggatggtggacgatcgggtcgccggaccgttgatccgctccgtgctgccggcgggctggtttatcgccgataagaccggagctggcgagcggggtgcgcgcgggattgtcgccctgcttggcccgaataacaaagcagagcgcattgtggtgatttatctgcgggataccccggcgagcatggccgagcgaaat

SEQ ID NO: 1901 - DNA, 861 bp, Escherichia coli
atgcgttatattcgcctgtgtattatctccctgttagccaccctgccgctggcggtacacgccagcccgcagccgcttgagcaaattaaactaagcgaaagccagctgtcgggccgcgtaggcatgatagaaatggatctggccagcggccgcacgctgaccgcctggcgcgccgatgaacgctttcccatgatgagcacctttaaagtagtgctctgcggcgcagtgctggcgcgggtggatgccggtgacgaacagctggagcgaaagatccactatcgccagcaggatctggtggactactcgccggtcagcgaaaaacaccttgccgacggcatgacggtcggcgaactctgcgccgccgccattaccatgagcgataacagcgccgccaatctgctactggccaccgtcggcggccccgcaggattgactgcctttttgcgccagatcggcgacaacgtcacccgccttgaccgctgggaaacggaactgaatgaggcgcttcccggcgacgcccgcaacaccactaccccggccagcatggccgcgaccctgcgcaagctgctgaccagccagcgtctgagcgcccgttcgcaacggcagctgctgcagtggatggtggacgatcgggtcgccggaccgttgatccgctccgtgctgccggcgggctggtttatcgccgataagaccggagctggcgagcggggtgcgcgcgggattgtcgccctgcttggcccgaataacaaagcagagcgcattgtggtgatttatctgcgggataccccggcgagcatggccgagcgaaatcagcaaatcgccgggatcggcgcggcgctgatcgagcactggcaacgctaa

SEQ ID NO: 1902 - DNA, 861 bp, Klebsiella pneumoniae strain 803
atgcgttatattcgcctgtgtattatctccctgttagccaccctgccgctggcggtacacgccagcccgcagccgcttgagcaaattaaacaaagcgaaagccagctgtcgggccgcgtaggcatgatagaaatggatctggccagcggccgcacgctgaccgcctggcgcgccgatgaacgctttcccatgatgagcacctttaaagtagtgctctgcggcgcagtgctggcgcgggtggatgccggtgacgaacagctggagcgaaagatccactatcgccagcaggatctggtggactactcgccggtcagcgaaaaacaccttgccgacggcatgacggtcggcgaactctgcgccgccgccattaccatgagcgataacagcgccgccaatctgctgctggccaccgtcggcggccccgcaggattgactgcctttttgcgccagatcggcgacaacgtcacccgccttgaccgctgggaaacggaactgaatgaggcgcttcccggcgacgcccgcgacaccactaccccggccagcatggccgcgaccctgcgcaagctgctgaccagccagcgtctgagcgcccgttcgcaacggcagctgctgcagtggatggtggacgatcgggtcgccggaccgttgatccgctccgtgctgccggcgggctggtttatcgccgataagaccggagctgccgagcggggtgcgcgcgggattgtcgccctgcttggcccgaataacaaagcagagcgcattgtggtgatttatctgcgggatacgccggcgagcatggccgagcgaaatcagcaaatcgccgggatcggcgcggcgctgatcgagcactggcaacgctaa

SEQ ID NO: 1903 - DNA, 896 bp, Klebsiella pneumoniae ATCC 700603
atgcgttattttcgcctgtgtattatctccctgttagccaccctgccgctggcggtacacgccagcccgcagccgcttgagcaaattaaactaagcgaaagccagctgtcgggcagcgtaggcatgatagaaatggatctggccagcggccgcacgctgaccgcctggcgcgccgatgaacgctttcccatgatgagcacctttaaagtagtgctctgcggcgcagtgctggcgcgggtggatgccggtgacgaacagctggagcgaaagatccactatcgccagcaggatctggtggactactcgccggtcagcgaaaaacaccttgccgacggcatgacggtcggcgaactctgtgccgccgccattaccatgagcgataacagcgccgccaatctgctgctggccaccgtcggcggccccgcaggattgactgcctttttgcgccagatcggcgacaacgtcacccgccttgaccgctgggaaacggaactgaatgaggcgcttcccggcgacgcccgcgacaccactaccccggccagcatggccgcgaccctgcgcaagctgctgaccagccagcgtctgagcgcccgttcgcaacggcagctgctgcagtggatggtggacgatcgggtcgccggaccgttgatccgctccgtgctgccggcgggctggtttatcgccgataagaccggagctgccaaacggggtgcgcgcgggattgtcgccctgcttggcccgaataacaaagcagagcggattgtggtgatttatctgcgggatacgccggcgagcatggccgagcgaaatcagcaaatcgccgggatcggcgcggcgctgatcgagcactggcaacgctaacccggcggtggccgcgcgcgttatccggctcgtag

SEQ ID NO: 1904 - DNA, 861 bp, Escherichia coli strain JC2926
atgcgttatattcgcctgtgtattatctccctgttagccaccctgccgctggcggtacacgccagcccgcagccgcttgagcaaattaaactaagcgaaagccagctgtcgggccgcgtaggcatgatagaaatggatctggccagcggccgcacgctgaccgcctggcgcgccgatgaacgctttcccatgatgagcacctttaaagtagtgctctgcggcgcagtgctggcgcgggtggatgccggtgacgaacagctggagcgaaagatccactatcgccagcaggatctggtggactactcgccggtcagcgaaaaacaccttgccgacggcatgacggtcggcgaactctgcgccgccgccattaccatgagcgataacagcgccgccaatctgctactggccaccgtcggcggccccgcaggattgactgcctttttgcgccagatcggcgacaacgtcacccgccttgaccgctgggaaacggaactgaatgaggcgcttcccggcgacgcccgcgacaccactaccccggccagcatggccgcgaccctgcgcaagctgctgaccagccagcgtctgagcgcccgttcgcaacggcagctgctgcagtggatggtggacgatcgggtcgccggaccgttgatccgctccgtgctgccggcgggctggtttatcgccgataagaccggagctagcgagcggggtgcgcgcgggattgtcgccctgcttggcccgaataacaaagcagagcgcattgtggtgatttatctgcgggataccccggcgagcatggccgagcgaaatcagcaaatcgccgggatcggcgcggcgctgatcgagcactggcaacgctaa

SEQ ID NO: 1905 - DNA, 861 bp, Pseudomonas aeruginosa
atgcgttatattcgcctgtgtattatctccctgttagccaccctgccgctggcggtacacgccagcccgcagccgcttgagcaaattaaactaagcgaaagccagctgtcgggccgcgtaggcatgatagaaatggatctggccagcggccgcacgctgaccgcctggcgcgccgatgaacgctttcccatgatgagcacctttaaagtagtgctctgcggcgcagtgctggcgcgggtggatgccggtgacgaacagctggagcgaaagatccactatcgccagcaggatctggtggactactcgccggtcagcgaaaaacaccttgccgacggcatgacggtcggcgaactctgcgccgccgccattaccatgagcgataacagcgccgccaatctactactggccaccgtcggcggccccgcaggattgactgcctttttgcgccagatcggcgacaacgtcacccgccttgaccgctgggaaacggaactgaatgaggcgcttcccggcgacgcccgcgacaccactaccccggccagcatggccgcgaccctgcgcaagctgctgaccagccagcgtctgagcgcccgttcgcaacggcagctgctgcagtggatggtggacgatcgggtcgccggaccgttgatccgctccgtgctgccggcgggctggtttatcgccgataagaccggagctagcaaacggggtgcgcgcgggattgtcgccctgcttggcccgaataacaaagcagagcgcattgtggtgatttatctgcgggatacgccggcgagcatggccgagcgaaatcagcaaatcgccgggatcggcgcggcgctgatcgagcactggcaacgctaa

SEQ ID NO: 1906 - DNA, 20 bp, Artificial Sequence
  Synthetic DNA Sequence
ccttattcccttttttgcgg

SEQ ID NO: 1907 - DNA, 22 bp, Artificial Sequence
  Synthetic DNA Sequence
cacctatctcagcgatctgtct

SEQ ID NO: 1908 - DNA, 23 bp, Artificial Sequence
  Synthetic DNA Sequence
aacagcggtaagatccttgagag

SEQ ID NO: 1909 - DNA, 22 bp, Artificial Sequence
  Synthetic DNA Sequence
atgacttggttaagtactcacc

SEQ ID NO: 1910 - DNA, 22 bp, Artificial Sequence
  Synthetic DNA Sequence
atgacttggttgagtactcacc

SEQ ID NO: 1911 - DNA, 22 bp, Artificial Sequence
  Synthetic DNA Sequence
ccataaccatgggtgataacac

SEQ ID NO: 1912 - DNA, 22 bp, Artificial Sequence
  Synthetic DNA Sequence
ccataaccatgagtgataacac

SEQ ID NO: 1913 - DNA, 20 bp, Artificial Sequence
  Synthetic DNA Sequence
cgccttgatcattgggaacc

SEQ ID NO: 1914 - DNA, 20 bp, Artificial Sequence
  Synthetic DNA Sequence
cgccttgatcgttgggaacc

SEQ ID NO: 1915 - DNA, 20 bp, Artificial Sequence
  Synthetic DNA Sequence
cgccttgatagttgggaacc

SEQ ID NO: 1916 - DNA, 20 bp, Artificial Sequence
  Synthetic DNA Sequence
cgtgggtcttgcggtatcat

SEQ ID NO: 1917 - DNA, 20 bp, Artificial Sequence
  Synthetic DNA Sequence
cgtgggtctggcggtatcat

SEQ ID NO: 1918 - DNA, 21 bp, Artificial Sequence
  Synthetic DNA Sequence
gtgggtctcacggtatcattg

SEQ ID NO: 1919 - DNA, 21 bp, Artificial Sequence
  Synthetic DNA Sequence
cgtgggtctctcggtatcatt

SEQ ID NO: 1920 - DNA, 20 bp, Artificial Sequence
  misc_feature (1)...(20): n=a,t,c or g
cgtggntctcgcggtatcat

SEQ ID NO: 1921 - DNA, 21 bp, Artificial Sequence
  Synthetic DNA Sequence
cgtgggtctagcggtatcatt

SEQ ID NO: 1922 - DNA, 24 bp, Artificial Sequence
  Synthetic DNA Sequence
gttttccaatgattagcactttta

SEQ ID NO: 1923 - DNA, 24 bp, Artificial Sequence
  Synthetic DNA Sequence
gttttccaatgataagcactttta

SEQ ID NO: 1924 - DNA, 23 bp, Artificial Sequence
  Synthetic DNA Sequence
gttttccaatgctgagcactttt

SEQ ID NO: 1925 - DNA, 23 bp, Artificial Sequence
  Synthetic DNA Sequence
cgttttccaatgatgagcacttt

SEQ ID NO: 1926 - DNA, 23 bp, Artificial Sequence
  Synthetic DNA Sequence
gttttccaatggtgagcactttt

SEQ ID NO: 1927 - DNA, 861 bp, Neisseria meningitidis strain MC9690-129
atgagtattcaacattttcgtgtcgcccttattcccttttttgcggcattttgccttcctgtttttgctcacccagaaacgctggtgaaagtaaaagatgctgaagatcagttgggtgcacgagtgggttacatcgaactggatctcaacagcggtaagatccttgagagttttcgccccgaagaacgttttccaatgatgagcacttttaaagttctgctatgtggtgcggtattatcccgtgttgacgccgggcaagagcaactcggtcgccgcatacactattctcagaatgacttggttgagtactcaccagtcacagaaaagcatcttacggatggcatgacagtaagagaattatgcagtgctgccataaccatgagtgataacactgctgccaacttacttctgacaacgatcggaggaccgaaggagctaaccgcttttttgcacaacatgggggatcatgtaactcgccttgatcgttgggaaccggagctgaatgaagccataccaaacgacgagcgtgacaccacgatgcctgcagcaatggcaacaacgttgcgcaaactattaactggcgaactacttactctagcttcccggcaacaattaatagactggatggaggcggataaagttgcaggaccacttctgcgctcggcccttccggctggctggtttattgctgataaatctggagccggtgagcgtgggtctcgcggtatcattgcagcactggggccagatggtaagccctcccgtatcgtagttatctacacgacggggagtcaggcaactatggatgaacgaaatagacagatcgctgagataggtgcctcactgattaagcattggtaa

SEQ ID NO: 1928 - DNA, 861 bp, Escherichia coli strain HB251
atgagtattcaacatttccgtgtcgcccttattcccttttttgcggcattttgccttcctgtttttgctcacccagaaacgctggtgaaagtaaaagatgctgaagatcagttgggtgcacgagtgggttacatcgaactggatctcaacagcggtaagatccttgagagttttcgccccgaagaacgttttccaatgatgagcacttttaaagttctgctatgtggcgcggtattatcccgtgttgacgccgggcaagagcaactcggtcgccgcatacactattctcagaatgacttggttaagtactcaccagtcacagaaaagcatcttacggatggcatgacagtaagagaattatgcagtgctgccataaccatgagtgataacactgcggccaacttacttctgacaacgatcggaggaccgaaggagctaaccgcttttttgcacaacatgggggatcatgtaactcgccttgatcattgggaaccggagctgaatgaagccataccaaacgacgagcgtgacaccacgatgcctgcagcaatggcaacaacgttgcgcaaactattaactggcgaactacttactctagcttcccggcaacaattaatagactggatggaggcggataaagttgcaggaccacttctgcgctcggcccttccggctggctggtttattgctgataaatctggagccggtgagcgtgggtctcgcggtatcattgcagcactggggccagatggtaagccctcccgtatcgtagttatctacacgacggggagtcaggcaactatggatgaacgaaatagacagatcgctgagataggtgcctcactgattaagcattggtaa

SEQ ID NO: 1929 - DNA, 808 bp, Klebsiella oxytoca strain 26W
atgagtattcaacatttccgtgtcgcccttattcccttttttgcggcattttgccttcctgtttttgctcacccagaaacgctggtgaaagtaaaagatgctgaagatcagttgggtgcacgagtgggttacatcgagctggatctcaacagcggtaagatccttgagagttttcgccccgaagaacgttttccaatgatgagcacttttaaagttctgctatgtggtgcggtattatcccgtgttgacgccgggcaagagcaactcggtcgccgcatacactattctcagaatgacttggttgagtactcaccagtcacagaaaagcatcttacggatggcatgacagtaagagaattatgcagtgctgccataaccatgagtgataacactgcggccaacttacttctgacaacgatcggaggaccgaaggagctaaccgcttttttgcacaacatgggggatcatgtaacccgccttgatagttgggaaccggagctgaatgaagccataccaaacgacgagcgtgacaccacgatgcctgcagcaatggcaacaacgttgcgcaaactattaactggcgaactacttactctagcttcccggcaacaattaatagactggatggaggcggataaagttgcaggaccacttctgcgctcggcccttccggctggctggtttattgctgataaatctggagccggtaagcgtggatctcgcggtatcattgcagcactggggccagatggtaagccctcccgtatcgtagttatctacacgacggggagtcaggcaactatggatg

SEQ ID NO: 1930 - DNA, 861 bp, Escherichia coli
atgagtattcaacattttcgtgtcgcccttattcccttttttgcggcattttgccttcctgtttttgctcacccagaaacgctggtgaaagtaaaagatgctgaagatcagttgggtgcacgagtgggttacatcgaactggatctcaacagcggtaagatccttgagagttttcgccccgaagaacgttttccaatgatgagcacttttaaagttctgctatgtggcgcggtattatcccgtgttgacgccgggcaagagcaactcggtcgccgcatacactattctcagaatgacttggttgagtactcaccagtcacagaaaagcatcttacggatggcatgacagtaagagaattatgcagtgctgccataaccatgagtgataacactgctgccaacttacttctgacaacgatcggaggaccgaaggagctaaccgcttttttgcacaacatgggggatcatgtaactcgccttgatcgttgggaaccggagctgaatgaagccataccaaacgacgagcgtgacaccacgatgcctgcagcaatggcaacaacgttgcgcaaactattaactggcgaactacttactctagcttcccggcaacaattaatagactggatggaggcggataaagttgcaggaccacttctgcgctcggcccttccggctggctggtttattgctgataaatctggagccggtgagcgtgggtctggcggtatcattgcagcactggggccagatggtaagccctcccgtatcgtagttatctacacgacggggagtcaggcaactatggatgaacgaaatagacagatcgctgagataggtgcctcactgattaagcattggtaa

SEQ ID NO: 1931 - DNA, 861 bp, Escherichia coli strain BM2728
atgagtattcaacatttccgtgtcgcccttattcccttttttgcggcattttgccttcctgtttttgctcacccagaaacgctggtgaaagtaaaagatgctgaagatcagttgggtgcacgagtgggttacatcgaactggatctcaacagcggtaagatccttgagagttttcgccccgaagaacgttttccaatgatgagcacttttaaagttctgctatgtggcgcggtattatcccgtgttgacgccgggcaagagcaactcggtcgccgcatacactattctcagaatgacttggttgagtactcaccagtcacagaaaagcatcttacggatggcatgacagtaagagaattatgcagtgctgccataaccatgagtgataacactgcggccaacttacttctgacaacgatcggaggaccgaaggagctaaccgcttttttgcacaacatgggggatcatgtaactcgccttgatcgttgggaaccggagctgaatgaagccataccaaacgacgagcgtgacaccacgatgcctgcagcaatggcaacaacgttgcgcaaactattaactggcgaactacttactctagcttcccggcaacaattaatagactggatggaggcggataaagttgcaggaccacttctgcgctcggcccttccggctggctggtttattgctgataaatctggagccggtgagcgtgggtctctcggtatcattgcagcactggggccagatggtaagccctcccgtatcgtagttatctacacgacggggagtcaggcaactatggatgaacgaaatagacagatcgctgagataggtgcctcactgattaagcattggtaa

SEQ ID NO: 1932 - DNA, 861 bp, Escherichia coli
atgagtattcaacattttcgtgtcgcccttattcccttttttgcggcattttgccttcctgtttttgctcacccagaaacgctggtgaaagtaaaagatgctgaagatcagttgggtgcacgagtgggttacatcgaactggatctcaacagcggtaagatccttgagagttttcgccccgaagaacgttttccaatgctgagcacttttaaagttctgctatgtggtgcggtattatcccgtgttgacgccgggcaagagcaactcggtcgccgcatacactattctcagaatgacttggttgagtactcaccagtcacagaaaagcatcttacggatggcatgacagtaagagaattatgcagtgctgccataaccatgagtgataacactgctgccaacttacttctgacaacgatcggaggaccgaaggagctaaccgcttttttgcacaacatgggggatcatgtaactcgccttgatcgttgggaaccggagctgaatgaagccataccaaacgacgagcgtgacaccacgatgcctgcagcaatggcaacaacgttgcgcaaactattaactggcgaactacttactctagcttcccggcaacaattaatagactggatggaggcggataaagttgcaggaccacttctgcgctcggcccttccggctggctggtttattgctgataaatctggagccggtgagcgtgggtctagcggtatcattgcagcactggggccagatggtaagccctcccgtatcgtagttatctacacgacggggagtcaggcaactatggatgaacgaaatagacagatcgctgagataggtgcctcactgattaagcattggtaa

SEQ ID NO: 1933 - DNA, 861 bp, Escherichia coli
atgagtattcaacatttccgtgtcgcccttattcccttttttgcggcattttgccttcctgtttttgctcacccagaaacgctggtgaaagtaaaagatgctgaagatcagttgggtgcacgagtgggttacatcgagctggatctcaacagcggtaagatccttgagagttttcgccccgaagaacgttttccaatggtgagcacttttaaagttctgctatgtggtgcggtattatcccgtgttgacgccgggcaagagcaactcggtcgccgcatacactattctcagaatgacttggttgagtactcaccagtcacagaaaagcatcttacggatggcatgacagtaagagaattatgcagtgctgccataaccatgagtgataacactgcggccaacttacttctgacaacgatcggaggaccgaaggagctaaccgcttttttgcacaacatgggggatcatgtaacccgccttgatcgtcgggaaccggagctgaatgaagccataccaaacgacgagcgtgacaccacgatgcctgcagcaatggcaacaacgttgcgcaaactattaactggcgaactacttactctagcttcccggcaacaattaatagactggatggaggcggataaagttgcaggaccacttctgcgctcggcccttccggctggctggtttattgctgataaatctggagccggtgagcgtggatctcgcggtatcattgcagcactggggccagatggtaagccctcccgtatcgtagttatctacacgacggggagtcaggcaactatggatgaacgagatagacagatcgctgagataggtgcctcactgattaagcattggtaa

SEQ ID NO: 1934 - DNA, 25 bp, Artificial Sequence
  Synthetic DNA Sequence
gaacgccagcgcgaaattcaaaaag

SEQ ID NO: 1935 - DNA, 21 bp, Artificial Sequence
  Synthetic DNA Sequence
agctcggcatacttcgacagg

SEQ ID NO: 1936 - DNA, 15 bp, Artificial Sequence
  Synthetic DNA Sequence
taccacccgcacggc

SEQ ID NO: 1937 - DNA, 17 bp, Artificial Sequence
  Synthetic DNA Sequence
cggagtcgccgtcgatg

SEQ ID NO: 1938 - DNA, 41 bp, Artificial Sequence
  Synthetic DNA Sequence
ccgcgcaccattgcttcgtacactgaggagtctccgcgcgg

SEQ ID NO: 1939 - DNA, 46 bp, Artificial Sequence
  Synthetic DNA Sequence
cgacccggatggtagtatcgataatgatccgccagcggccgggtcg

SEQ ID NO: 1940 - DNA, 19 bp, Artificial Sequence
  Synthetic DNA Sequence
gtatcgttggtgacgtaat

SEQ ID NO: 1941 - DNA, 18 bp, Artificial Sequence
  Synthetic DNA Sequence
gcaatggtccgtttaagt

SEQ ID NO: 1942 - DNA, 27 bp, Artificial Sequence
  Synthetic DNA Sequence
gactggaacaaagcctataaaaaatca

SEQ ID NO: 1943 - DNA, 16 bp, Artificial Sequence
  Synthetic DNA Sequence
gctggtggacggccag

SEQ ID NO: 1944 - DNA, 19 bp, Artificial Sequence
  Synthetic DNA Sequence
tttcgccgccatgcgttac

SEQ ID NO: 1945 - DNA, 17 bp, Artificial Sequence
  Synthetic DNA Sequence
cggcgactacgcggtat

SEQ ID NO: 1946 - DNA, 17 bp, Artificial Sequence
  Synthetic DNA Sequence
cggcgacttcgcggtat

SEQ ID NO: 1947 - DNA, 19 bp, Artificial Sequence
  Synthetic DNA Sequence
cggtatacggcaccatcgt

SEQ ID NO: 1948 - DNA, 19 bp, Artificial Sequence
  Synthetic DNA Sequence
gcggtatacaacaccatcg

SEQ ID NO: 1949 - DNA, 19 bp, Artificial Sequence
  Synthetic DNA Sequence
cggtatacgccaccatcgt

SEQ ID NO: 1950 - DNA, 15 bp, Artificial Sequence
  Synthetic DNA Sequence
ggcgacatcgcctgc

SEQ ID NO: 1951 - DNA, 17 bp, Artificial Sequence
  Synthetic DNA Sequence
ggcgacagagcctgcta

SEQ ID NO: 1952 - DNA, 19 bp, Artificial Sequence
  Synthetic DNA Sequence
cctgctatggagcgatggt

SEQ ID NO: 1953 - DNA, 21 bp, Artificial Sequence
  Synthetic DNA Sequence
cgcctgctataaagcgatggt

SEQ ID NO: 1954 - DNA, 589 bp, Klebsiella pneumoniae subsp. pneumoniae ATCC 13883
acaccggtcaacattgaggaagagcttaagaactcttatctggattatgcgatgtcggtcattgttggccgtgcgctgccggatgtccgagatggcctgaagccggtacaccgtcgcgtactttacgccatgaacgtattgggcaatgactggaacaaagcctataaaaaatcagcccgtgtcgttggtgacgtaatcggtaaataccacccgcacggcgactccgcggtatacgacaccatcgtgcgtatggcgcagccgttctcgctgcgttacatgctggtggacggccagggtaactttggttccatcgacggcgactccgccgcggcgatgcgttataccgaaattcgtctggcgaaaatcgctcatgagctgatggccgatcttgaaaaagagacggtcgatttcgtcgacaactatgacggtacggagcgtattccggacgtcatgccgaccaaaattcctaacctgctggtgaacggcgcctccgggatcgccgtagggatggccaccaacataccgccacataacctgacggaagtgattaacggctgtctggcgtatgttgacgatgaagacatcagca

SEQ ID NO: 1955 - DNA, 38 bp, Artificial Sequence
  Synthetic DNA Sequence
cgcgcaaccattgcttcgtacactgaggagtctgcgcg

SEQ ID NO: 1956 - DNA, 989 bp, Candida inconspicua ATCC 16783
cggtaaaaccactttaactgctgcaatcaccaaagttttatctgaagaaggtggtgcagatttcttagattattcatctattgataaagcaccagaagagagagctagaggtattaccatttctactgctcatgttgaatatgaaactccaaacagacattattcacatgttgattgtccaggtcatcaagattatattaagaacatgattactggtgcagctcaaatggatggtgctattattgttgttgcagctactgatggtcaaatgccacaaactaaggaacatttattattagctagacaagttggtgttcaacatttagttgtttttgttaacaagtgtgataccgttgatgatccagaaatgttrgaattagttgaaatggaaatgagagaattattgaccgaatatggattygatggtgataacacaccagttattatgggttctgcattaatggcattagaaggtaagagaccagaagttggtaaagaatctattgttaagttaatggaagctgttgatacttggattccaactccacaaagagacttagaaaaaccattcttattaccaattgatgaagttttctctatttctggtagaggtactgttgtttctggtactgttgatagaggtacattaaagaagggtgaagaagttgaaattgttggtggtaaagaaggtgttattaagactactgttaccggtattgaaatgtatcacaaggaattagatcaagcacaagctggtgatactccaggtattttgttaagaggtgttaagagagatcaaattgcaagaggtcaaattcttgcaaagccaggwtctgttaaggcatacaagaagttcttatcatcattatacattttaacaaaggaagaaggtggtagacatactccattttctgaaaattacagacctcaaatgtacattagaacttccaatgttaatgttactttgaagttcccagaaactgaagaag

SEQ ID NO: 1957 - DNA, 991 bp, Candida utilis ATCC 22023
ggtaagaccacccttactgccgccatcaccaagtgccttgctgagaagggaggtgcctcgttcttggactacagtgccatcgacaaggcgccagaggagagagcaagaggtatcaccatctccactgcgcacgttgagtatgaaactgccaacagacactactcgcacgttgactgtccaggtcacgctgattacatcaagaacatgattaccggtgctgcgcagatggacggtgctatcattgtcgttgcagccactgacggtcagatgccacagaccagagaacacttgttgcttgccagacaagttggtgtccagcacattgttgtcttcgtcaacaaggttgacaccatcgacgaccctgagatgcttgagcttgttgaaatggagatgagagagttgcttacttcgtatggatttgacggtgataacaccccagttatcatgggttctgctttgtgtgctttggaaggccgtgagccagagattggtgctaaggccattgacaagttgatggaggccattgatgagtacatcccaactcctcagagagacctggaaaagccattcytgatgggtgttgaagacgtgttctcgatctctggtagaggtaccgttgtcacrggccgtgttgagcgtggtaacttgaagaaaggtgatgaaattgaacttgttggctacaacaagaacccaatcaagaccaccgtcaccggtatcgaaatgttcaagaaggagttggaatctgccatggctggtgacaactgtggtatcttgttgcgtggtatcaagagagatgacgtcaagagaggtatggttgctgctaagccaggctccgtctctgcacacaccaagttcctcgcttccttgtacatcctgacraaggaggaaggtggtcgtcacagtgcctttgctgagaactacagaccacagatgttcatcagaaccggagatgtcaccaccatcttgacatggccagaggagcacgctgacc

SEQ ID NO: 1958 - DNA, 985 bp, Candida zeylanoides ATCC 7351
cggtaagaccactttgaccgccgccatcaccaaggtgttgagcgccaaaggtggtgcttccttcttggactacgggtccatcgacagagcccctgaggagagagccagaggtattactatctcgactgcccacgttgagtacgagaccgataagagacactacgcccacgttgattgccctggtcacgctgattacatcaagaacatgatcactggtgccgcccaaatggacggtgccattattgtcgttgctgcttctgatggccaaatgccgcagaccagagagcacttgttgcttgccagacaggttggtgtgcagaacttggttgtgtttgttaacaaggtggacaccatcgacgaccccgaaatgttggagttggtggagatggaaatgagagaattgttgacccactacggctttgacggtgacaacacccctgtcatcatgggttcggcgttgtgtgccttggaagacaggcagcctgagattggcgagcaagccatcatgaagttgttggacgctgtcgacgagtacattcccactcctcagagagacttggagcaaccatttttgatgcccgttgaggatgttttctccatctctggcagaggtactgttgtcaccggtcgtgttgagagaggctcattgaagaagggtgaggagattgagattgttggcgacttccccaagcccttcaagactaccgtcaccggcattgagatgttcaagaaggagttggatgccgcgatggcgggcgacaacgccgggatcttgttgagaggtgtcaagagagacgaggtctcgagaggtatggttttggccaagcccggtactgtcacttcgcacaccaaggtgttggcgtcgctttacatcttgaccaaagaggaaggtggccgccactcgccctttggtgagaactacaagccacagttattcatcagaacctccgatgtcactggtactttgaggttccccgccggtgag

SEQ ID NO: 1959 - DNA, 973 bp, Candida catenulata ATCC 10565
cggtaagaccaccttgactgccgccatcaccaaggttctctccgagaagggtggtgccgacttcttggactacggtgccattgacagagcccccgaggagcgtgcccgtggtatcaccatctccactgcccacgttgagtacgagactgacaaccgtcactacgcccacattgactgtcccggtcacgctgattacatcaagaacatgattaccggtgccgcccagatggacggtgccattattgtccttgctgctactgacggtgccatgccccagacccgcgagcacttgcttctcgcccgtcaggttggtatccaggaattggttgtgtttgtgaacaaggttgacaccatcgacgaccccgagatgttggagctcgttgagatggagatccgcgagttgttgtctgagttcggttttgacggtgacaacacccccgtcatcatgggttccgctttgtgcgctttggagggcaagcagcccgagattggtgagcaggctatcaccaagttgatggccgccgttgacgagcacatccccaccccccagcgtgacttggagcagcctttcttgatgcctgttgagggtgttttctctatctctggccgtggtaccgtggtgactggtaaggttgcccgtggtgtcctcaagaagggtgaggagattgagattgttggcaactttgacaagccctacaaggtgactgttactggtattgagatgttcaagaaggagttggaccaggccatggctggtgacaacgccggtatcttgttgcgtggtgtcaagcgtgacgaggtgtctcgtggtatggttttggccaagcccggcactgttgtctcgcacaagaaggttttggcttcgctttacatcttgacccaggaggagggtggccgtaagaccggcttcggctccaactacaagccccagttgttcttgcgcactaccgacgtcactggtaccctcaccttc

SEQ ID NO: 1960 - DNA, 985 bp, Candida krusei ATCC 28870
aagactaccttgactgctgcaatcaccaaggtcttagctgatcaaggtggtgctgatttcttagattatgcatctattgacaaggctcctgaagaaagagcaagaggtattactatctctactgctcacgttgagtatgaaaccccaaacagacattattctcatgtcgattgtcctggccatcaagattatattaagaatatgattactggtgctgcacaaatggatggtgctattattgttgttgctgctactgatggtcaaatgccacaaactaaggaacatttattattagcaagacaagttggtgttcaacatttagttgtctttgttaataaatgtgacaccattgatgacccagaaatgttggaattagttgaaatggaaatgagagaactattgtctgaatatggttttgatggtgataacactccagttattatgggttctgcattgatggctttagaagacaagagacctgaagttggtaaggaatctattttaaagttaatggaagcygttgacacatggattccaaccccagagagagatttagaaaaaccatttttgttacctattgatgaagttttctcaatctctggtagaggtactgtcgtttctggtactgtcgaaagaggtactttgaagaagggtgaagaagttgaaattgttggtggtaaggatggttctattaaaactactgtcacaggtattgaaatgtatcacaaggaattagaccaagcgcaagcaggtgatactccaggtattttattaagaggtgtcaagagagaccaaatcaagagaggtcaaattttagcaaagccagattccgttaaggcatacaagaagttcttggcttccctttatatcttaaccaaggaagaaggtggtagacatacaccattctctgaaaactacagaccacaaatgtacatcagaactaccaatgttaacgttactttgaagttcccagacactgaagaag

SEQ ID NO: 1961 - DNA, 22 bp, Artificial Sequence
  Synthetic DNA Sequence
gctcaaggcagatggcattccc

SEQ ID NO: 1962 - DNA, 22 bp, Artificial Sequence
  Synthetic DNA Sequence
ggacaaggcggttgcgtttgat

SEQ ID NO: 1963 - DNA, 22 bp, Artificial Sequence
  Synthetic DNA Sequence
cattcccgtctcgctcgacagt

SEQ ID NO: 1964 - DNA, 19 bp, Artificial Sequence
  Synthetic DNA Sequence
atctgcctgcccgtcttgc

SEQ ID NO: 1965 - DNA, 816 bp, Unknown Organism
  Description of Unknown Organism: Plasmid pGS05
atgaataaatcgctcatcattttcggcatcgtcaacataacctcggacagtttctccgatggaggccggtatctggcgccagacgcagccattgcgcaggcgcgtaagctgatggccgagggggcagatgtgatcgacctcggtccggcatccagcaatcccgacgccgcgcctgtttcgtccgacacagaaatcgcgcgtatcgcgccggtgctggacgcgctcaaggcagatggcattcccgtctcgctcgacagttatcaacccgcgacgcaagcctatgccttgtcgcgtggtgtggcctatctcaatgatattcgcggttttccagacgctgcgttctatccgcaattggcgaaatcatctgccaaactcgtcgttatgcattcggtgcaagacgggcaggcagatcggcgcgaggcacccgctggcgacatcatggatcacattgcggcgttctttgacgcgcgcatcgcggcgctgacgggtgccggtatcaaacgcaaccgccttgtccttgatcccggcatggggttttttctgggggctgctcccgaaacctcgctctcggtgctggcgcggttcgatgaattgcggctgcgcttcgatttgccggtgcttctgtctgtttcgcgcaaatcctttctgcgcgcgctcacaggccgtggtccgggggatgtcggggccgcgacactcgctgcagagcttgccgccgccgcaggtggagctgacttcatccgcacacacgagccgcgccccttgcgcgacgggctggcggtattggcggcgctgaaagaaaccgcaagaattcgttaa

SEQ ID NO: 1966 - DNA, 19 bp, Artificial Sequence
  Synthetic DNA Sequence
catgccagtcttgccaacg

SEQ ID NO: 1967 - DNA, 23 bp, Artificial Sequence
  Synthetic DNA Sequence
cagcaataagtaatccagcgatg

SEQ ID NO: 1968 - DNA, 20 bp, Artificial Sequence
  Synthetic DNA Sequence
ggagagatttcaccgcatag

SEQ ID NO: 1969 - DNA, 22 bp, Artificial Sequence
  Synthetic DNA Sequence
agccaaccatcatgctattcca

SEQ ID NO: 1970 - DNA, 1206 bp, Unknown Organism
  Description of Unknown Organism: Transposon Tn10
atgaatagttcgacaaagatcgcattggtaattacgttactcgatgccatggggattggccttatcatgccagtcttgccaacgttattacgtgaatttattgcttcggaagatatcgctaaccactttggcgtattgcttgcactttatgcgttaatgcaggttatctttgctccttggcttggaaaaatgtctgaccgatttggtcggcgcccagtgctgttgttgtcattaataggcgcatcgctggattacttattgctggctttttcaagtgcgctttggatgctgtatttaggccgtttgctttcagggatcacaggagctactggggctgtcgcggcatcggtcattgccgataccacctcagcttctcaacgcgtgaagtggttcggttggttaggggcaagttttgggcttggtttaatagcggggcctattattggtggttttgcaggagagatttcaccgcatagtcccttttttatcgctgcgttgctaaatattgtcactttccttgtggttatgttttggttccgtgaaaccaaaaatacacgtgataatacagataccgaagtaggggttgagacgcaatcgaattcggtatacatcactttatttaaaacgatgcccattttgttgattatttatttttcagcgcaattgataggccaaattcccgcaacggtgtgggtgctatttaccgaaaatcgttttggatggaatagcatgatggttggcttttcattagcgggtcttggtcttttacactcagtattccaagcctttgtggcaggaagaatagccactaaatggggcgaaaaaacggcagtactgctcgaatttattgcagatagtagtgcatttgcctttttagcgtttatatctgaaggttggttagatttccctgttttaattttattggctggtggtgggatcgctttacctgcattacagggagtgatgtctatccaaacaaagagtcatgagcaaggtgctttacagggattattggtgagccttaccaatgcaaccggtgttattggcccattactgtttactgttatttataatcattcactaccaatttgggatggctggatttggattattggtttagcgttttactgtattattatcctgctatcgatgaccttcatgttaacccctcaagctcaggggagtaaacaggagacaagtgcttag

SEQ ID NO: 1971 - DNA, 21 bp, Artificial Sequence
  Synthetic DNA Sequence
cygactgygccatcctyatca

SEQ ID NO: 1972 - DNA, 21 bp, Artificial Sequence
  Synthetic DNA Sequence
  modified_base (3): i
  modified_base (13): i
mgncagctcatynttgcwksc

SEQ ID NO: 1973 - DNA, 21 bp, Artificial Sequence
  Synthetic DNA Sequence
  modified_base (9): i
  modified_base (16): i
racaccrgnyttggwntcctt

SEQ ID NO: 1974 - DNA, 22 bp, Artificial Sequence
  Synthetic DNA Sequence
  modified_base (8): i
acaagggntggrmsaaggagac

SEQ ID NO: 1975 - DNA, 21 bp, Artificial Sequence
  Synthetic DNA Sequence
tgrccrgggtggttraggacg

SEQ ID NO: 1976 - DNA, 21 bp, Artificial Sequence
  Synthetic DNA Sequence
  modified_base (16): i
gatggaytcygtyaantggga

SEQ ID NO: 1977 - DNA, 21 bp, Artificial Sequence
  Synthetic DNA Sequence
gatggaytcygtyaartggga

SEQ ID NO: 1978 - DNA, 23 bp, Artificial Sequence
  Synthetic DNA Sequence
  modified_base (5): i
catcntgyaatggyaatctyaat

SEQ ID NO: 1979 - DNA, 23 bp, Artificial Sequence
  Synthetic DNA Sequence
catcytgyaatggyaasctyaat

SEQ ID NO: 1980 - DNA, 22 bp, Artificial Sequence
  Synthetic DNA Sequence
  modified_base (9): i
  modified_base (12): i
  modified_base (14): i
tcratggcntcnanragrgtyt

SEQ ID NO: 1981 - DNA, 21 bp, Artificial Sequence
  Synthetic DNA Sequence
  modified_base (9): i
  modified_base (15): i
tggacaccnscaagnggkcyg

SEQ ID NO: 1982 - DNA, 21 bp, Artificial Sequence
  Synthetic DNA Sequence
  modified_base (9): i
  modified_base (15): i
tggacacynscaagnggkcyg

SEQ ID NO: 1983 - DNA, 21 bp, Artificial Sequence
  Synthetic DNA Sequence
  modified_base (14): i
cygaytgcgcyatnctcatca

SEQ ID NO: 1984 - DNA, 21 bp, Artificial Sequence
  Synthetic DNA Sequence
cygaytgygcyatyctsatca

SEQ ID NO: 1985 - DNA, 1383 bp, Cryptococcus neoformans strain M1-106
atgggtaaggacaagctgcacgtcaacgtcgttgttatcggtcacgtcgactccggtaagtcgaccaccaccggtcacttgatctacaagtgcggtggtatcgacaagcgaaccattgagaagttcgagaaggaggctcaagagctcggaaagtcttctttcaagtacgcttgggttcttgacaagcttaaggccgagcgagagcgaggtatcaccatcgacattgctctttggaagttcgagacccctaagtaccaggttaccgtcattgacgcccccggtcaccgagacttcatcaagaacatgatcaccggtacctcccaggctgactgtgccatcctcatcattgccaccggtatcggtgagttcgaggctggtatctccaaggacggtcagacccgagagcacgccctcctcgccttcaccctcggtgtcaggcagctcattgttgcttgcaacaagatggacacctgcaagtggtctgaggaccgattcaacgaaatcgtcaaggagaccaacggtttcatcaagaaggttggttacaaccccaaggctgtccccttcgtccccatctctggttggcacggtgacaacatgttggaggagaccaccaacatgccctggtacaagggatggaccaaggagaccaagtccggtgtttccaagggtaagacccttctcgaggccatcgacgccagtaggccccctacccgacccaccgacaagcccctccgtctccctctccaggacgtctacaagatcggtggtatcggcacagtccctgtcggccgagtcgagaccggtgtcatcaaggccggtatggtcgtcaagttcgcccccaccaacgtcaccactgaagtcaagtccgttgagatgcaccacgagcagatccccgagggtctccccggagacaacgttggtttcaacgtcaagaacgtttccatcaaggacatccgacgaggtaacgtctgtggtgactccaagaacgacccccctatggaggctgcttctttcaacgcccaggttatcgtccttaaccaccctggtcagatcggtgccggttacacccccgttctcgactgtcacactgcccacattgcttgcaagttctctgagttgatcgagaagattgaccgacgaaccggtaaggtcatggaggccgcccccaagttcgtcaagtctggtgacgccgccattgtcaagcttgtttcccagaagcctctctgtgttgagacctacgccgactacccccctcttggtcgattcgccgtccgagacatgcgacagaccgttgccgttggtgttattaagagtgtggagaagtccgatgggaagagcggcaaggttaccaaggccgccgagaaggctgctaagaagaagtaa

SEQ ID NO: 1986 - DNA, 1380 bp, Cryptococcus neoformans strain B3501
atgggtaaggacaagctgcacgtcaacgtcgttgttatcggtcacgtcgactccggtaagtcgaccaccaccggtcacttgatctacaagtgcggtggtatcgacaagcgaaccattgagaagttcgagaaggaggctcaagagctcggaaagtcttctttcaagtacgcttgggttcttgacaagcttaaggccgagcgagagcgaggtatcaccatcgacattgctctttggaagttcgagacccccaggtaccaggtcaccgtcattgacgcccccggtcaccgagacttcatcaagaacatgatcaccggtacctcccaggctgactgtgccatcctcatcattgccaccggtatcggtgagttcgaggccggtatctccaaggacggtcagacccgagagcacgccctcctcgccttcaccctcggtgtcaggcagctcattgttgcttgcaacaagatggacacctgcaagtggtccgaggaccgattcaacgaaatcgtcaaggagaccaacggtttcatcaagaaggttggctacaaccccaaggctgtccccttcgtccccatctctggttggcacggtgacaacatgttggaggagaccaccaacatgccctggtacaagggatggaccaaggagaccaagtctggtgtttccaggggtaagacccttctcgaggccatcagcgccagtaggccccatacccgacccaccgacaagcccctccgtctccctctccaggacgtctacaagatcggtggtatcggcacagtccctgtcggccgagtcgagaccggtgtcatcaaggccggtatggtcgtcaagttcgcccccaccaacgtcaccactgaagtcaagtccgttgagatgcaccacgagcagatccccgagggtcttcccggagacaacgttggtttcaacgtcaagaacgtttccatcaaggacatccgacgaggtaacgtctgtggtgactccaagaacgacccccctatggaggctgcttctttcaacgcccaggttatcgtccttaaccaccctggtcagatcggtgccggttacacccccgttctcgactgtcacactgcccacattgcctgcaagtttgctgagttgatcgagaagattgaccgacgaaccggtaaggtcatggaggccgcccccaagttcgtcaagtctggtgacgccgccattgtcaagcttgttgcccagaagcccctctgtgttgagacctacgccgactacccccctcttggtcgattcgccgtccgagacatgcgacagaccgttgccgttggtgttatcaagagcgtggacaagaccgagaagggtggcaaggtcaccaaggctgctgagaaggctgccaagaagaagtaa

SEQ ID NO: 1987 - DNA, 1377 bp, Saccharomyces cerevisiae
atgggtaaagagaagtctcacattaacgttgtcgttatcggtcatgtcgattctggtaagtctaccactaccggtcatttgatttacaagtgtggtggtattgacaagagaaccatcgaaaagttcgaaaaggaagccgctgaattaggtaagggttctttcaagtacgcttgggttttggacaagttaaaggctgaaagagaaagaggtatcactatcgatattgctttgtggaagttcgaaactccaaagtaccaagttaccgttattgatgctccaggtcacagagatttcatcaagaacatgattactggtacttctcaagctgactgtgctatcttgattattgctggtggtgtcggtgaattcgaagccggtatctctaaggatggtcaaaccagagaacacgctttgttggctttcaccttgggtgttagacaattgattgttgctgtcaacaagatggactccgtcaaatgggacgaatccagattccaagaaattgtcaaggaaacctccaactttatcaagaaggttggttacaacccaaagactgttccattcgtcccaatctctggttggaacggtgacaacatgattgaagctaccaccaacgctccatggtacaagggttgggaaaaggaaaccaaggccggtgtcgtcaagggtaagactttgttggaagccattgacgccattgaacaaccatctagaccaactgacaagccattgagattgccattgcaagatgtttacaagatcggtggtattggtactgtgccagtcggtagagttgaaaccggtgtcatcaagccaggtatggttgttactttcgccccagctggtgttaccactgaagtcaagtccgttgaaatgcatcacgaacaattggaacaaggtgttccaggtgacaacgttggtttcaacgtcaagaacgtttccgttaaggaaatcagaagaggtaacgtctgtggtgacgctaagaacgatccaccaaagggttgcgcttctttcaacgctaccgtcattgttttgaaccatccaggtcaaatctctgctggttactctccagttttggattgtcacactgctcacattgcttgtagattcgacgaattgttggaaaagaacgacagaagatctggtaagaagttggaagaccatccaaagttcttgaagtccggtgacgctgctttggtcaagttcgttccatctaagccaatgtgtgttgaagctttcagtgaatacccaccattaggtagattcgctgtcagagacatgagacaaactgtcgctgtcggtgttatcaagtctgttgacaagactgaaaaggccgctaaggttaccaaggctgctcaaaaggctgctaagaaataa

SEQ ID NO: 1988 - DNA, 1377 bp, Saccharomyces cerevisiae; identical to SEQ ID NO: 665

SEQ ID NO: 1989 - DNA, 1377 bp, Eremothecium gossypii ATCC 10895
atgggtaaggaaaagactcacgttaacgttgtcgtcatcggtcacgtcgactctggtaagtctactaccaccggtcacttgatctacaagtgtggtggtattgacaagagaaccatcgagaagttcgagaaggaggctgccgagttgggtaagggttctttcaagtacgcctgggttttggacaaattgaaggctgagagagagagaggtatcaccatcgacattgcgttgtggaagttcgagactccaaagtaccacgtcactgtcattgacgccccaggccacagagacttcatcaagaacatgattaccggtacttctcaagctgactgtgccatcttgatcattgctggtggtgtcggtgagttcgaggctggtatctccaaggacggtcagaccagagagcacgctttgttggcttacaccttgggtgtcaagcagttgatcgttgccatcaacaagatggactccgtcaagtgggacgagtccagataccaggagattgtcaaggagacctccaacttcatcaagaaggtcggttacaaccctaagactgttccattcgttccaatctccggctggaacggtgacaacatgattgaggccaccaccaacgccccatggtacaagggctgggagaaggagaccaaggctggtgccgtcaagggtaagaccttgttggaggccattgacgccattgagccacctgtcagaccaactgacaaggcattgagattgccattgcaggatgtctacaagatcggtggtattggtacggttccagtcggcagagtcgagaccggtgtcatcaagccaggtatggttgttaccttcgccccatccggtgtcaccactgaagtcaagtccgtcgagatgcaccacgagcaattggaggagggtgtcccaggtgacaacgttggtttcaacgtcaagaacgtctccgtcaaggagatcagaagaggtaacgtttgcggtgactccaagaacgacccaccaaaggctgctgagtccttcaacgctaccgtcattgtcttgaaccacccaggtcaaatctctgccggttactctccagtcttggactgtcacactgcccacattgcttgtaagttcgacgagttgttggagaagaacgacagaagaaccggtaagaagttggaagactctccaaagttcctaaaggccggtgacgctgccatggtcaagtttgtcccatccaagccaatgtgtgttgaggctttcaccgactacccaccattgggtagattcgctgtcagagacatgagacagaccgttgctgtcggtgtcatcaagtctgttgtcaagtccgacaaggctggtaaggtcaccaaggccgcccaaaaggctggtaagaaatag

SEQ ID NO: 1990 - DNA, 1377 bp, Eremothecium gossypii
atgggtaaggaaaagactcacgttaacgttgtcgtcatcggtcacgtcgactctggtaagtctactaccaccggtcacttgatctacaagtgtggtggtattgacaagagaaccatcgagaagttcgagaaggaggctgccgagttgggtaagggttctttcaagtacgcctgggttttggacaaattgaaggctgagagagagagaggtatcaccatcgacattgcgttgtggaagttcgagactccaaagtaccacgtcactgtcattgaccccccaggccacagagacttcatcaagaacatgattaccggtacttctcaagctgactgtgccatcttgatcattgctggtggtgtcggtgagttcgaggctggtatctccaaggacggtcagaccagagagcacgctttgttggcttacaccttgggtgtcaagcagttgatcgttgccatcaacaagatggactccgtcaagtgggacgagtccagataccaggagattgtcaaggagacctccaacttcatcaagaaggtcggttacaaccctaagactgttccattcgttccaatctccggctggaacggtgacaacatgattgaggccaccaccaacgccccatggtacaagggctgggagaaggagaccaaggctggtgccgtcaagggtaagaccttgttggaggccattgacgccattgagccacctgtcagaccaactgacaaggcattgagattgccattgcaggatgtctacaagatcggtggtattggtacggttccagtcggcagagtcgagaccggtgtcatcaagccaggtatggttgttaccttcgccccatccggtgtcaccactgaagtcaagtccgtcgagatgcaccacgagcaattggaggagggtgtcccaggtgacaacgttggtttcaacgtcaagaacgtctccgtcaaggagatcagaagaggtaacgtttgcggtgactccaagaacgacccaccaaaggctgctgagtccttcaacgctaccgtcattgtcttgaaccacccaggtcaaatctctgccggttactctccagtcttggactgtcacactgcccacattgcttgtaagttcgacgagttgttggagaagaacgacagaagaaccggtaagaagttggaagactctccaaagttcctaaaggccggtgacgctgccatggtcaagtttgtcccatccaagccaatgtgtgttgaggctttcaccgactacccaccattgggtagattcgctgtcagagacatgagacagaccgttgctgtcggtgtcatcaagtctgttgtcaagtccgacaaggctggtaaggtcaccaaggccgcccaaaaggctggtaagaaatag

SEQ ID NO: 1991 - DNA, 1646 bp, Aspergillus oryzae strain KBN616
tggggtaagtttatcaacccgtcgagttgtgttgcatctcagatcatggctgacaagtactttcctccttacagtaaggaagacaagcagcacatcaacatcgtcgttatcggccacgtcgattccggcaagtccaccaccactggtcacttgatctacaagtgtggtggtatcgaccagcgtaccatcgagaagttcgagaaggaagccgctgagctcggtaagggttccttcaagtacgcctgggttcttgacaagctcaagtccgagcgtgagcgtggtatcaccatcgatatcgccctctggaagttccagacctccaagtatgaggtcaccgtcattggtaagcatttgagttccaacctacgttgcccaacatttacagtcatctaacaaagttcaatagatgcccccggtcaccgtgacttcatcaagaacatgatcactggtacttcccaggctgactgcgctatcctcatcattgcctccggtactggtgaattcgaggctggtatctccaaggatggtcagacccgtgagcacgctctgctcgctttcaccctcggtgtccgtcagctcatcgttgccctcaacaagatggacacctgcaagtggtctcaggatcgttacaacgaaatcgttaaggagacttccaacttcatcaagaaggtcggatacaaccccaagagcgttcctttcgtccccatctccggtttcaacggtgacaacatgattgaggcctccaccaactgcccctggtacaagggctgggagaaggagaccaaggctggcaagtccaccggtaagacccttctcgaggccatcgatgccatcgagccccccgtccgtcccaccgacaagcctctccgtcttcccctccaggatgtctacaagatctctggtatcggtactgtgcccgtcggtcgtgtcgagactggtgtcatcaagcctggtatggtcgttactttcgctcctgccaacgtgaccactgaagtcaagtccgttgaaatgcaccaccagcagctccaggccggtaaccccggtgacaacgttggtttcaacgtcaagaacgtctccgtcaaggaagtccgccgtggtaacgttgccggtgactccaagaacgacccccctgctggctgcgattccttcaacgcccaggtcatcgtccttaaccaccccggtcaggtcggcaacggttacgctcccgtcctggactgccacaccgctcacattgcttgcaagttcgctgagctccttgagaagattgaccgccgtaccggtaaatctgttgaggacaagcccaagttcatcaagtctggtgatgctgccatcgtcaagatgattccctccaagcccatgtgtgtggagtctttcactgacttcccccctcttggtcgtttcgctgtccgtgacgtaagtttttccctcttgactatcttcacaatttttcacatattttcacgcctcgtcccactctttttcctcccttcctctttggttcccctttttgcctgcaagttctctatagctaacatgatgtctagatgcgtcaaactgttgccgtcggagttatcaagtcggttgagaagaacactggcggttctggcaaggtcaccaaggccgcccagaaggctggcaagaaataa

SEQ ID NO: 1992 - DNA, 1380 bp, Aureobasidium pullulans strain R106
atgggtaaggaaaagtcccacatcaacgtcgtcgttatcggccacgtcgactccggtaagtcgaccaccaccggtcacttgatctacaagtgcggtggtatcgacaagcgtaccatcgagaagttcgagaaggaagccgccgaactcggcaagggttccttcaagtacgcctgggtcctcgacaagctgaagtctgagcgtgagcgtggtatcactatcgatatcgctctgtggaagttcgagacccccaagtacatggtcaccgtcatcgatgcccccggtcaccgtgatttcatcaagaacatgatcactggtacctcccaggctgactgcgccattctcatcattgccgccggtactggtgagttcgaggctggtatctccaaggatggccagactcgtgagcacgcccttctcgcctacacccttggtgtcaagcagctcatcgtcgctatcaacaagatggacaccaccaagtggtctgaggcccgttaccaggagatcatcaaggagacctccggtttcatcaagaaggtcggctacaaccccaagcacgttccctttgtccccatctcgggtttcaacggtgacaacatgattgaggtttcttccaactgcccctggtacaagggttgggagaaggagaccaaggccaaggccactggtaagactctcctcgaggccattgacgccatcgaccctccttcgcgccccaccgacaagcccctccgtcttcccctccaggatgtctacaagatcggtggtattggcacggtgcccgtcggccgtgtcgagaccggtaccatcaagggtggtatggtcgtcaccttcgcccccgctggtgtcaccactgaggtcaagtccgtcgagatgcaccacgagcagctctccgagggtctccccggtgacaacgtcggcttcaacgtcaagaacgtctccgtcaaggagatccgtcgtggtaacgttgccggtgactccaagaacgacccccccaagggttgcgactccttcaacgcccaggtcatcgtcctcaaccaccccggtcaggtcggtgctggttacgcacccgtcctcgattgccacactgcccacatcgcctgcaagttctccgagcttgttgagaagattgaccgccgtaccggcaagtccgttgaggccgcccccaagttcatcaagtctggtgacgccgccatcgtcaagatggttccctccaagcctatgtgtgttgaggccttcactgactaccctcctctcggtcgtttcgccgtccgtgacatgagacagaccgtcgctgtcggtgtcatcaagtccgtcgccaagtccgacaagcagggtgccggtaaggttaccaaggccgctgtcaaggctggcaagaagtaa

SEQ ID NO: 1993 - DNA, 1383 bp, Histoplasma capsulatum strain 186AS
atgggtaaggaagacaagactcacattaacctcgtcgtcatcggccacgtcgattcgggcaaatctaccaccactggtcatttgatctacaaatgcggtggtattgacagccgtaccattgagaagttcgaaaaggaagccgaagagttgggcaagaaatccttcaaatatgcgtgggtccttgacaaactgaagtctgagcgtgagcgtggtatcaccatcgatattgccctctggaaattcgagactccgaagtacagtgtcactgtcattgatgctcccggccatcgtgacttcatcaagaacatgatcactggtacctcccaggctgactgcgctatcctcatcattgctgccggtactggtgagttcgaggctggtatctccaaggatggccagactcgtgagcacgctctgcttgctttcacccttggtgtgaggcaactcatcgttgccatcaacaagatggacaccaccaagtggtccgagtcccgtttcaacgaaatcatcaaggaggtttccaacttcatcaagaaggtcggatataaccccaaggctgttcccttcgtgccaatctctggtttcgagggtgacaacatgattgaaccctcccccaactgcacatggtacaagggctggaacaaggagactgcctctggcaagtcttctggtaaaacccttctcgatgccattgacgccattgaacccccaacccgtcctaccgataagcccctccgtcttcccctccaggatgtgtacaaaatctctggtattggcactgttcccgtcggacgtgttgagactggtgtcatcaagcccggtatggtcgtgactttcgctccctccaacgtcaccactgaagtcaagtccgtcgaaatgcaccaccaacaactccaggctggttaccctggcgacaacgtcggcttcaacgtcaagaacgtttcagtcaaggaagtccgccgtggcaacgttgctggcgactccaaaaatgatccccctaagggctgcgaatccttcaatgcccaggtcatcgtccttaaccaccccggccaggttggcgctggttatgccccagtcctcgactgccacactgcccacattgcttgcaagttctctgagcttattgagaagatcgaccgccgtaccggaaagtctgttgagaacaaccccaagttcatcaagtctggtgatgctgctatcgtcaagatggttccctccaagcccatgtgcgtggagcccttcactgactatccccctcttggacgtttcgctgtccgtgacatgagacaaaccgtcgctgtcggtgtcatcaagtccgtcatcaagtctgacaagactgctggcaaggtcaccaaggccgcgcagaaggccaccaagaaataa

SEQ ID NO: 1994 - DNA, 1383 bp, Neurospora crassa
atgggcaaggaggacaagactcacatcaacgtcgtcgttatcggccacgtcgattccggcaagtctaccactaccggtcacttgatctacaagtgcggtggtatcgacaagcgtaccatcgagaagttcgagaaggaagccgctgagctcggtaagggttccttcaagtatgcctgggttcttgacaagctcaaggccgagcgtgagcgtggtatcaccatcgatatcgccctctggaagttcgagactcccaagtactacgtcaccgtcatcgatgcccccggtcatcgtgatttcatcaagaacatgatcactggtacctcccaggctgattgcgctatcctcatcattgccgccggtactggtgagttcgaggctggtatctccaaggatggccagacccgtgagcacgccctgctcgcctacaccctcggtgtcaagcagctcattgttgccatcaacaagatggacaccacccagtggtcccagactcgtttcgaggagatcatcaaggagaccaagaacttcatcaagaaggttggctacaaccccgctggtgtcgctttcgtccccatctccggcttcaacggcgacaacatgcttgagccctccaccaactgcccctggtacaagggttgggagaaggagaccaaggccggcaaggccactggcaagaccctcctcgaggccatcgacgccattgagccccccaagcgtcctaccgacaagcccctccgtcttcccctccaggatgtctacaagatcggtggtatcggcacagtgcccgtcggccgtatcgagactggtgtcctcaagcccggtatggtcgttaccttcgctccttccaacgtcaccactgaagtcaagtccgtcgagatgcaccacgagcagcttgctcagggtgtccccggtgacaacgtcggcttcaacgtgaagaacgtttccgtcaaggatatccgccgtggtaacgttgccggtgactccaagaacgacccccctgctggcgccgcctctttcaccgcccaggtcatcgttctcaaccaccccggtcaggtcggtgcccgctacgcccccgtcctcgactgccacactgcccacattgcctgcaagttcgccgagctcctcgagaagatcgaccgccgtactggtaaggctgttgaggcctcccccaagttcatcaagtctggtgatgctgccatcgtcaagatgattccctccaagcccatgtgcgttgaggctttcaccgactaccctcccctcggccgtttcgccgtccgtgacatgcgtcagaccgtcgccgtcggtgtcatcaaggccgtcgacaagtccaccgctgccgctggcaaggtcaccaagtccgctgccaaggccgccaagaagtaa

SEQ ID NO: 1995 - DNA, 1383 bp, Podospora anserina
atgggcaaggaggacaagactcacatcaacgtcgtcgttatcggccacgtcgattccggcaagtcgaccaccactggtcacttgatctacaagtgcggtggtattgacaagcgtaccatcgagaagttcgagaaggaagctgctgagctcggcaagggctctttcaagtatgcctgggttcttgacaagttgaaggccgagcgtgagcgtggtatcaccatcgatattgccctctggaagttcgagacccccaagtactatgtcaccgtcattgatgcccccggccatcgtgatttcatcaagaacatgattactggtacttcccaggccgattgcgccattctcatcattgccgccggtactggtgagttcgaggctggtatctccaaggatggccagacccgtgagcacgctctcctcgcctacaccctcggtgtgaagcagctcatcgtcgccatcaacaagatggacaccaccaagtggtccgaggcccgcttcaacgagatcatcaaggagacctccaacttcatcaagaaggtcggctacaaccccaagactgttgccttcgtccccatctccggtttcaacggcgacaacatgcttgaggcttccaccaactgcccctggtacaagggctgggagaaggaggtcaagggtggcaaggccaccggcaagaccctccttgaggccatcgactccatcgagccccccaagcgtcccaccgacaagcccctccgtcttcccctccaggatgtctacaagatcggcggtatcggcacagtccctgtcggccgtatcgagactggtatcctcaagcccggtatggtcgttaccttcgctccttccaacgtcaccactgaagtcaagtccgtcgagatgcaccacgagcagctcgctgagggtgttcccggtgacaacgttggtttcaacgtgaagaacgtctccgtcaaggaaatccgccgtggcaacgttgccggtgactccaagaacgacccccccatgggcgccgcctctttcgatgcccaggtcatcgtcctcaaccaccccggccaggtcggtgctggttacgcccccgtcctcgattgccacactgcccacatcgcctgcaagttctctgagctcctgcagaagatcgaccgccgtactggtaaggccgttgaggagagccccaagttcatcaagtctggtgatgctgccatcgtcaagatggttccctccaagcccatgtgcgttgaggctttcactgagtaccctcccctcggtcgtttcgccgtccgtgacatgcgtcagaccgtcgctgtcggtgtcatcaagaaggtcgagaaggccgctgctggttccggcaaggttaccaagtccgctgccaaggctggcaagaaataa

SEQ ID NO: 1996 - DNA, 1386 bp, Podospora curvicolla strain VLV
atgggcaaggaggacaagactcacatcaacgtcgtcgttatcggccacgtcgattccggcaagtcgaccaccactggtcacttgatctacaagtgcggtggtattgacaagcgtaccatcgagaagttcgagaaggaagctgctgagctcggcaagggctctttcaagtatgcctgggttcttgacaagttgaaggccgagcgtgagcgtggtatcaccattgatatcgccctctggaagttcgagacccccaagtactatgtcaccgtcatcgatgcccccggccatcgtgatttcatcaagaacatgattactggtacttcccaggccgattgcgccattctcatcattgccgccggtactggtgagttcgaggctggtatctccaaggatggccagacccgtgagcacgctctcctcgcctacaccctcggtgtgaagcagctcatcgtcgccatcaacaagatggacaccaccaaatggtccgaggcccgcttcaacgagatcatcaaggagacctccaacttcatcaagaaggtcggctacaaccccaagactgttgccttcgtccccatctccggtttcaacggcgacaacatgcttgaggcttccaccaactgcccctggtacaagggttgggagaaggaggtcaagggtggcaaggctactggcaagaccctcctcgaggccatcgactccatcgagccccccaagcgtcccaccgacaagcccctccgtcttccccttcaggacgtttacaagatcggcggtatcggcacagtccctgtcggccgtatcgagactggtatcctcaagcccggtatggtcgttaccttcgccccttccaacgtcaccactgaagtcaagtccgtcgagatgcaccacgagcagctctctgagggtgtccccggtgacaacgttggtttcaacgtgaagaacgtctccgtcaaggaaatccgccgtggcaacgttgccggtgactccaagaacgacccccctcttggcgccgcttctttcgatgcccaggtcatcgtcctcaaccaccccggccaggtcggtgctggttacgcccccgtcctcgattgccacactgcccacatcgcctgcaagttcgctgagctcctgcagaagatcgatcgccgtactggtaaggctgttgaggagagccctaagttcatcaagtctggtgatgctgccatcgtcaagatgattccctccaagcccatgtgcgttgaggctttcactgagtaccctcccctcggtcgtttcgctgtccgtgacatgcgtcagaccgtcgctgtcggtgtcatcaagaaggtcgagaaggccgctgctggttccggcaaggtcaccaagtccgctgccaaggctggtggcaagaaataa

SEQ ID NO: 1997 - DNA, 1383 bp, Sordaria macrospora strain OOO
atgggtaaggaagacaaggctcacatcaacgtcgtcgttatcggccacgtcgattccggcaagtccaccactaccggtcacctgatctacaagtgcggtggtatcgacaagcgtaccatcgagaagttcgagaaggaagccgctgagctcggcaagggttccttcaagtatgcctgggttcttgacaagctcaaggccgagcgtgagcgtggtatcaccatcgatatcgccctctggaagttcgagactcccaagtactacgtcaccgtcatcgatgcccccggccatcgtgatttcatcaagaacatgatcactggtacctcccaggctgattgcgctattctcatcattgccgctggtactggtgagttcgaggctggtatctccaaggatggccagactcgtgagcacgctcttctcgcctacaccctcggtgtcaagcagctcatcgttgccatcaacaagatggacaccacccagtggtcccaggctcgtttcgaggagatcatcaaggagaccaagaacttcatcaagaaggtcggctacaaccccgccaccgtcgctttcgtccccatctccggcttcaacggcgacaacatgcttgaggcctccaccaactgcccctggtacaagggttgggagaaggagaccaaggccggcaagtccactggcaagaccctcctcgaggccatcgacgccattgagcagcccaagcgcccgaccgacaagcccctccgtcttcccctccaggatgtctacaagatcggcggtatcggcacagtgcccgtcggccgtatcgagactggtgtcctcaagcccggtatggtcgttaccttcgctccttccaacgtcaccactgaagtcaagtccgtcgagatgcaccacgagcagcttgctcagggtgttcccggtgacaacgtcggcttcaacgtgaagaacgtttccgtcaaggatatccgtcgtggtaacgttgccggtgactccaagaacgacccccctgtcggcgctgcctctttcaccgcccaggtcatcgtccttaaccaccccggtcaggtcggtgccggctacgctcccgtcctcgattgccacactgcccacattgcctgcaagttcgccgagctcctcgagaagatcgatcgccgtactggtaaggctgttgagacttctcccaagttcatcaagtctggtgatgctgccatcgtcaagatgattccctccaagcccatgtgcgtcgaggctttcaccgactaccctcccctcggtcgtttcgccgtccgtgacatgcgtcagaccgtcgctgtcggtgtcatcaaggccgtcgacaagacccaggctgtcgctggcaaggtcaccaagtctgctgccaaggctgccaagaagtaa

SEQ ID NO: 1998 - DNA, 1383 bp, Trichoderma reesei strain QM9414
atgggtaaggaggacaagactcacatcaacgtggtcgtcatcggccacgtcgactccggcaagtctaccaccactggtcacttgatctaccagtgcggtggtatcgacaagcgtaccattgagaagttcgagaaggaagccgccgaactcggcaagggttccttcaagtacgcgtgggttcttgacaagctcaaggccgagcgtgagcgtggtatcaccatcgacattgccctctggaagttcgagactcccaagtactatgtcaccgtcattgacgctcccggccaccgtgacttcatcaagaacatgatcactggtacttcccaggccgactgcgctatcctcatcatcgctgccggtactggtgagttcgaggctggtatctccaaggatggccagacccgtgagcacgctctgctcgcctacaccctgggtgtcaagcagctcatcgtcgccatcaacaagatggacactgccaactgggccgaggctcgttaccaggaaatcatcaaggagacttccaacttcatcaagaaggtcggcttcaaccccaaggccgttgctttcgtccccatctccggcttcaacggtgacaacatgctcaccccctccaccaactgcccctggtacaagggctgggagaaggagaccaaggctggcaagttcaccggcaagaccctccttgaggccatcgactccatcgagccccccaagcgtcccacggacaagcccctgcgtcttcccctccaggacgtctacaagatcggtggtatcggaacagttcccgtcggccgtatcgagactggtgtcctcaagcccggtatggtcgttaccttcgctccctccaacgtcaccactgaagtcaagtccgtcgagatgcaccacgagcagctcgctgagggccagcctggtgacaacgttggtttcaacgtgaagaacgtttccgtcaaggaaatccgccgtggcaacgttgccggtgactccaagaacgacccccccatgggcgccgcttctttcaccgcccaggtcatcgtcatgaaccaccccggccaggtcggtgccggctacgcccccgtcctcgactgccacactgcccacattgcctgcaagttcgccgagctcctcgagaagatcgaccgccgtaccggtaaggctaccgagtctgcccccaagttcatcaagtctggtgactccgccatcgtcaagatgatcccctccaagcccatgtgcgttgaggctttcaccgactaccctcccctgggtcgtttcgccgtccgtgacatgcgccagaccgtcgctgtcggtgtcatcaaggccgtcgagaagtcctctgccgccgccgccaaggtcaccaagtccgctgccaaggccgccaagaaataa

SEQ ID NO: 1999 - DNA, 29 bp, Artificial Sequence
  Synthetic DNA Sequence
catgtcaayattggtactattggtcatgt

SEQ ID NO: 2000 - DNA, 25 bp, Artificial Sequence
  Synthetic DNA Sequence
  modified_base (9): i
ccaccytcnctcamgttgaarcgtt

SEQ ID NO: 2001 - DNA, 23 bp, Artificial Sequence
  Synthetic DNA Sequence
  modified_base (6): i
  modified_base (12): i
acyacnttracngcygcyatyac

SEQ ID NO: 2002 - DNA, 21 bp, Artificial Sequence
  Synthetic DNA Sequence
  modified_base (3): i
  modified_base (15): i
ccngargaragagcnmgwggt

SEQ ID NO: 2003 - DNA, 21 bp, Artificial Sequence
  Synthetic DNA Sequence
  modified_base (9): i
catytcranrttgtcacctgg

SEQ ID NO: 2004 - DNA, 1360 bp, Candida albicans strain SC5314
gctgccttcgaccgttctaaacctcatgtcaacattggtactattggtcatgttgatcatggtaaaactacattgactgctgctatcaccaaagttttagccgaacaaggtggtgccaacttcttggattatggttctattgatagagctccagaagaaagagctagaggtatcactatttccactgcccacgttgaatacgaaaccaagaacagacactatgcccacgttgattgtccaggacacgctgattatatcaaaaatatgattactggtgccgctcaaatggatggtgctatcattgttgttgctgccactgatggtcaaatgcctcaaaccagagaacatttgttattggccagacaagttggtgttcaagacttggttgtgtttgtcaacaaagtcgatactattgatgaccctgaaatgttggaattagtcgaaatggaaatgagagaattgttatccacctacggttttgatggtgacaacactccagttattatgggatctgctttaatggctttggaagacaagaaaccagaaattggtaaggaagctatcttgaaattgttagatgctgtcgatgaacacattccaactccatcaagagacttggaacaaccatttttgttaccagttgaagacgtgttctccatctccggtagaggaactgttgtcactggtagagttgaaagaggtgttttgaagaagggtgaagaaatcgaaattgttggtggttttgacaaaccttacaagactactgttaccggtattgaaatgttcaaaaaagaattagactctgctatggctggtgacaactgtggtgttttgttaagaggtgttaaaagagatgaaatcaagagaggtatggttttggccaaaccaggtactgctacttctcacaagaagttcttggcttccttgtatattttgacttccgaagaaggtggtcgttccactccatttggtgaaggttacaagcctcaatgcttcttcagaactaacgatgtcactaccacattttcattcccagaaggagaaggtgttgatcattctcaaatgatcatgccaggtgacaacattgaaatggttggtgaattgatcaaatcttgtccattagaagtcaaccaacgtttcaacttgagagaaggtggtaaaactgttggtactggtttgattaccagaatcatcgaataaacagaatgtgcactgtgaataataaaaagaaaagaggtatatataggtgactttgtattttgtattgaacaataaaattctgtaaatagtaagggcctcagaagttttgatttgatttatgccatgtggacttgtagagatatccttctcaaacttcttg

SEQ ID NO: 2005 - DNA, 1342 bp, Schizosaccharomyces pombe
aagccgcatgtcaatattggtactattggtcatgttgaccacggtaaaacgacgttgacggctgctattactaaatgcctttctgatcttggtcaagctagttttatggattatagtcaaattgacaaggcccccgaggaaaaggcacgtggtattaccatttcatctgcccatgttgaatacgaaactgctaatcgtcactatgcccatgtggattgtcctggtcacgccgattacattaagaatatgattactggtgctgctacaatggatggcgctatcattgttgtttctgctaccgatggtcaaatgcctcaaactcgtgaacatttgcttctggctcgtcaagtcggtgtaaagcaaattgttgtatacatcaataaagtcgatatggtcgagcctgatatgatcgagcttgtcgaaatggaaatgcgtgagctactctccgaatacggatttgatggtgacaatactccaattgttagcggcagtgctttatgtgccttagagggtcgtgagcctgagattggtctcaatagtattactaaattgatggaagctgttgatagttatattactcttcctgaaagaaaaacggatgtccctttcttgatggccatcgaggacgttttttcaatttcaggtcgcggaactgtagtcactggccgtgtcgagcgcggtactttaaagaagggtgctgaaatcgaaatcgtcggttatggtagccatttaaagactaccgttactggaattgaaatgttcaaaaagcagcttgatgccgccgttgccggtgacaattgtggccttttacttcgttctatcaagcgagagcaattaaaacgtggaatgattgtcgctcaaccaggaaccgttgctcctcatcagaaattcaaggcatcattctatattttgacaaaagaggaaggaggtcgtcgtaccggtttcgttgacaagtatcgtccccaactgtacagtcgtacttccgacgttactgtcgaacttacccaccctgatcctaacgactcagacaaaatggttatgcctggagacaatgtcgagatgatctgtacgcttattcaccccattgtcatcgaaaaaggacaacgcttcacagttcgtgagggtggaagcactgtaggcacagctttggttactgaacttttggattagtgcatttatgaacttattggctttaaaaattttgcatgctgaataccaatattatgtcccttctcagaattctataactacagtgtcattattgtaataagacttttgcatccattgacaatggtatttgatacttttatagtttctactattgttagccaaagttataaaa

SEQ ID NO: 2006 - DNA, 18 bp, Artificial Sequence
  Synthetic DNA Sequence
tggagccggtgagcgtgg

SEQ ID NO: 2007 - DNA, 18 bp, Artificial Sequence
  Synthetic DNA Sequence
tggagccagtgagcgtgg

SEQ ID NO: 2008 - DNA, 19 bp, Artificial Sequence
  Synthetic DNA Sequence
tctggagccgatgagcgtg

SEQ ID NO: 2009 - DNA, 19 bp, Artificial Sequence
  Synthetic DNA Sequence
ctggagccagtaagcgtgg

SEQ ID NO: 2010 - DNA, 861 bp, Klebsiella pneumoniae strain KMK107
atgagtattcaacattttcgtgtcgcccttattcccttttttgcggcattttgccttcctgtttttgctcacccagaaacgctggtgaaagtaaaagatgctgaagatcagttgggtgcacgagtgggttacatcgaactggatctcaacagcggtaagatccttgagagttttcgccccgaagaacgttttccaatgatgagcacttttaaagttctgctatgtggtgcggtattatcccgtgttgacgccgggcaagagcaactcggtcgccgcatacactattctcagaatgacttggttaagtactcaccagtcacagaaaagcatcttacggatggcatgacagtaagagaattatgcagtgctgccataaccatgagtgataacactgctgccaacttacttctgacaacgatcggaggaccgaaggagctaaccgcttttttgcacaacatgggggatcatgtaactcgccttgatcgttgggaaccggagctgaatgaagccataccaaacgacgagcgtgacaccacgacgcctgcagcaatggcaacaacgttgcgcaaactattaactggcgaactacttactctagcttcccggcaacaattaatagactggatggaggcggataaagttgcaggaccacttctgcgctcggcccttccggctggctggtttattgctgataaatctggagccagtgagcgtgggtctcgcggtatcattgcagcactggggccagatggtaagccctcccgtatcgtagttatctacacgacggggagtcaggcaactatggatgaacgaaatagacagatcgctgagataggtgcctcactgattaagcattggtaa

SEQ ID NO: 2011 - DNA, 861 bp, Klebsiella pneumoniae strain CLSiS L-491
atgagtattcaacatttccgtgtcgcccttattcccttttttgcggcattttgctttcctgtttttgctcacccagaaacgctggtgaaagtaaaagatgctgaagatcagttgggtgcacgagtgggttacatcgagctggatctcaacagcggtaagatccttgagagttttcgccccgaagaacgttttccaatgatgagcacttttaaagttctgctatgtggtgcggtattatcccgtgttgacgccgggcaagagcaactcggtcgccgcatacactattctcagaatgacttggttgagtactcaccagtcacagaaaagcatcttacggatggcatgacagtaagagaattatgcagtgctgccataaccatgagtgataacactgcggccaacttacttctgacaacgatcggaggaccgaaggagctaaccgcttttttgcacaacatgggggatcatgtaacccgccttgatcgttgggaaccggagctgaatgaagccataccaaacgacgagcgtgacaccacgatgcctgcagcaatggcaacaacgttgcgcaaactattaactggcgaactacttactctagcttcccggcaacaattaatagactggatggaggcggataaagttgcaggaccacttctgcgctcggcccttccggctggctggtttattgctgataaatctggagccagtaagcgtggatctcgcggtatcattgcagcactggggccagatggtaagccctcccgtatcgtagttatctacatgacggggagtcaggcaactatggatgaacgaaatagacagatcgctgagataggtgcctcactgattaagcattggtaa

SEQ ID NO: 2012 - DNA, 49 bp, Artificial Sequence
  Synthetic DNA Sequence
  modified_base (29): n = guanidyl-MR-HEG
ccgcggattattaaaccgcccttccgcgnatgtcagagggatagatcca

SEQ ID NO: 2013 - DNA, 353 bp, Kluyvera ascorbata ATCC 33433
agcttaagaactcttatctggattacgcgatgtcggtcattgttggccgtgcgctgccggatgtccgagatggcctgaagccggtacaccgtcgcgtactttacgccatgaacgtattgggcaatgactggaacaaagcctacaaaaaatcagcccgtgtcgtgggtgacgtgatcggtaaatatcacccgcatggtgatactgccgtctatgacactatcgtccgtatggcacagccattctcactgcgatacatgctggtagatggtcaaggtaacttcggttctgtcgatggcgactccgccgcagcgatgcgttatacggaaatccgtatgtcgaaaatcgcccatgag

SEQ ID NO: 2014 - DNA, 355 bp, Kluyvera georgiana ATCC 51603
agctcctatctggattatgcgatgtcggtcattgttggccgtgcgctgccagatgtccgagatggcctgaagccggtacaccgtcgcgtactttacgccatgaacgtactaggcaatgactggaacaaagcctataaaaaatctgcccgtgtcgttggtgacgtaatcggtaaataccatccccatggtgactcggcggtctatgacacgatcgtccgcatggcgcagccattctcgctgcgttatatgctggtagacggtcagggtaacttcggttctatcgacggcgactctgcggcggcaatgcgttatacggaaatccgtctggcgaaaattgcccatgaactgatggccg

SEQ ID NO: 2015 - DNA, 22 bp, Artificial Sequence
  Synthetic DNA Sequence
ccaagaagctcaaaaacatctg

SEQ ID NO: 2016 - DNA, 20 bp, Artificial Sequence
  Synthetic DNA Sequence
tadcctgtccawacagccat

SEQ ID NO: 2017 - DNA, 22 bp, Artificial Sequence
  Synthetic DNA Sequence
actttgaataaggtcggtctag

SEQ ID NO: 2018 - DNA, 22 bp, Artificial Sequence
  Synthetic DNA Sequence
acactaaacaaggttggtttag

SEQ ID NO: 2019 - DNA, 22 bp, Artificial Sequence
  Synthetic DNA Sequence
acactaaacaaggtcggtctag

SEQ ID NO: 2020 - DNA, 22 bp, Artificial Sequence
  Synthetic DNA Sequence
gtagctccagatgaaatgtttg

SEQ ID NO: 2021 - DNA, 22 bp, Artificial Sequence
  Synthetic DNA Sequence
gtagctccagacgaaatgtttg

SEQ ID NO: 2022 - DNA, 22 bp, Artificial Sequence
  Synthetic DNA Sequence
gtagctccagatgaaacgtttg

SEQ ID NO: 2023 - DNA, 22 bp, Artificial Sequence
  Synthetic DNA Sequence
gtaactccagatgaaatgtttg

SEQ ID NO: 2024 - DNA, 20 bp, Artificial Sequence
  Synthetic DNA Sequence
agtgaaaagatggctgctgc

SEQ ID NO: 2025 - DNA, 20 bp, Artificial Sequence
  Synthetic DNA Sequence
agtgagaaaatggctgctgc

SEQ ID NO: 2026 - DNA, 23 bp, Artificial Sequence
  Synthetic DNA Sequence
tccaagcatgcattatgcaaacg

SEQ ID NO: 2027 - DNA, 23 bp, Artificial Sequence
  Synthetic DNA Sequence
tcggtctagatagagctaaaacg

SEQ ID NO: 2028 - DNA, 20 bp, Artificial Sequence
  Synthetic DNA Sequence
tatgctcttcaacaatcacg

SEQ ID NO: 2029 - DNA, 22 bp, Artificial Sequence
  Synthetic DNA Sequence
agccgttgagactttgaataag

SEQ ID NO: 2030 - DNA, 19 bp, Artificial Sequence
  Synthetic DNA Sequence
cttaatggtcttggtatcg

SEQ ID NO: 2031 - DNA, 22 bp, Artificial Sequence
  Synthetic DNA Sequence
cgtgactggggttctgctatga

SEQ ID NO: 2032 - DNA, 22 bp, Artificial Sequence
  Synthetic DNA Sequence
cgtgactggggatcatcaatga

SEQ ID NO: 2033 - DNA, 22 bp, Artificial Sequence
  Synthetic DNA Sequence
cgtgactggggttctgccatga

SEQ ID NO: 2034 - DNA, 22 bp, Artificial Sequence
  Synthetic DNA Sequence
atcaagaacactggctatgtag

SEQ ID NO: 2035 - DNA, 22 bp, Artificial Sequence
  Synthetic DNA Sequence
atcaagaacactggctacgtag

SEQ ID NO: 2036 - DNA, 22 bp, Artificial Sequence
  Synthetic DNA Sequence
atcaagaacactggttacgtag

SEQ ID NO: 2037 - DNA, 22 bp, Artificial Sequence
  Synthetic DNA Sequence
atcaaaaatactggttatgtag

SEQ ID NO: 2038 - DNA, 22 bp, Artificial Sequence
  Synthetic DNA Sequence
atcaagaatactggctacgtag

SEQ ID NO: 2039 - DNA, 22 bp, Artificial Sequence
  Synthetic DNA Sequence
atcaaaaacactggctatgtag

SEQ ID NO: 2040 - DNA, 19 bp, Artificial Sequence
  Synthetic DNA Sequence
tgtgaccccagacaaaccc

SEQ ID NO: 2041 - DNA, 20 bp, Artificial Sequence
  Synthetic DNA Sequence
gttgagcggcagcactatct

SEQ ID NO: 2042 - DNA, 20 bp, Artificial Sequence
  Synthetic DNA Sequence
cacggggatttctctattta

SEQ ID NO: 2043 - DNA, 20 bp, Artificial Sequence
  Synthetic DNA Sequence
cacggggattactctattta

SEQ ID NO: 2044 - DNA, 20 bp, Artificial Sequence
  Synthetic DNA Sequence
accgtaagtcggccaagtca

SEQ ID NO: 2045 - DNA, 19 bp, Artificial Sequence
  Synthetic DNA Sequence
gttctttctccgtatcgtc

SEQ ID NO: 2046 - DNA, 20 bp, Artificial Sequence
  Synthetic DNA Sequence
acggggatttttctatctat

SEQ ID NO: 2047 - DNA, 2160 bp, Streptococcus pneumoniae strain CS109
atgaacaaaccaacgattctgcgcctaatcaagtatctgagcattagcttcttaagcttggttatcgcagccattgtcttaggcggaggagtttttttctactatgttagcaaggctcctagcctatccgagagtaaactagttgcaacaacctctagtaaaatctacgacaataaaaatcaactcattgctgacttgggttctgaacgccgcgtcaatgcccaagctaatgatattcccacagatttggttaaggcaatcgtttctatcgaagaccatcgcttcttcgaccacagggggattgataccatccgtatcctgggagctttcttgcgcaatctgcaaagcaattccctccaaggtggatcaactctcacccaacagttgattaaattgacttacttttcaacctcgacttccgaccagactatttctcgtaaggctcaggaagcttggttagcgattcagttagaacaaaaagcaaccaaacaggaaatcttgacctactatataaataaggtctacatgtctaatggcaactatggaatgcagacagcagctcaaaactactatggtaaagacctcaataatttaagtttacctcagttagccttgctggctggaatgcctcaggcaccaaaccaatatgacccctattcacatccagaagcagcccaagaccgccgaaacttggtcttatctgaaatgaaaaatcaaggttacatctctgctgaacagtatgagaaagcagtcaatacaccaattactgatggactacaaagtctcaaatcagcaagtaattaccctgcttacatggataattacctcaaggaagtcatcaatcaagttgaagaagaaactggctataaccttctaactactgggatggatgtttacacaaatgtagaccaagaagctcaaaaacatctgtgggatatctacaactccgatcaatacgtctcttaccctgacgatgatttgcaagtcgcatctacggtcgtagatgtttcaaatggtaaagtcatcgcacaacttggtgctcgtcatcaagcaagtaatgtttcattcggtaccaaccaggccgtagaaaccaatcgtgactggggatcatcaatgaaaccaatcactgactatgctcccgctttagaatatggagtctatgactctactgcttctattgtacatgatgtcccttataactatcctggcactgatactccactctacaactgggatcatgtctactttggaaacattacaatccagtatgctcttcaacaatcacgaaatgtcacagccgttgagactttgaataaggtcggtctagatagagctaaaaccttccttaatggtcttggtatcgactatccaagcatgcattatgcaaacgccatttcaagtaacacaactgaatccaacaaaaaatatggtgcaagtagtgaaaaaatggctgctgcctacgctgcttttgctaatggtggtatttatcacaaaccaatgtatatcaataaaatcgtctttagtgatggtagcgaaaaagaattttctgatgctggtacacgagctatgaaagagactactgcctatatgatgactgaaatgatgaaaactgttttaacttacggaacaggacgtggagcctacctaccatggcttccacaagcaggtaagacaggtacttctaactatactgacgaagaaattgaaaagtatatcaagaacactggttacgtagctccagatgaaatgtttgtagggtatacccgtaaatatgcaatggctgtttggacaggatactcaaatcgtctaactccaatcatcggagatggtttccttgttgctggtaaagtctatcgttcaatgataacttacctttctgaagatgaccaacctggagattggacaatgccagatggcttgtatagaaatggagaattcgtatttaaaaatggtgctcgttctacgtggagctcacctgctccacaacaacccccatcaactgaaagttcaagctcatcatcagatagttcaacttcacagtctaactcaaccactccaagcacaaataatagtacgactaccaatcctaacaataatacgcaacaatcaaatacaacccctgatcaacaaaatcagaatcctcaaccagcacaaccataa

SEQ ID NO: 2048 - DNA, 2160 bp, Streptococcus pneumoniae strain R6
atgaacaaaccaacgattctgcgcctaatcaagtatctgagcattagcttcttaagcttggttatcgcagccattgtcttaggcggaggagtttttttctactacgttagcaaggctcctagcctatccgagagtaaactagttgcaacaacttctagtaaaatctacgacaataaaaatcaactcattgctgacttgggttctgaacgccgcgtcaatgcccaagctaatgatattcccacagatttggttaaggcaatcgtttctatcgaagaccatcgcttcttcgaccacagggggattgataccatccgtatcctgggagctttcttgcgcaatctgcaaagcaattccctccaaggtggatcagctctcactcaacagttgattaagttgacttacttttcaacttcgacttccgaccagactatttctcgtaaggctcaggaagcttggttagcgattcagttagaacaaaaagcaaccaagcaagaaatcttgacctactatataaataaggtctacatgtctaatgggaactatggaatgcagacagcagctcaaaactactatggtaaagacctcaataatttaagtttacctcagttagccttgctggctggaatgcctcaggcaccaaaccaatatgacccctattcacatccagaagcagcccaagaccgccgaaacttggtcttatctgaaatgaaaaatcaaggctacatctctgctgaacagtatgagaaagcagtcaatacaccaattactgatgggctacaaagtctcaaatcagcaagtaattaccctgcttacatggataattacctcaaggaagtcatcaatcaagttgaagaagaaacaggctataacctactcacaactgggatggatgtctacacaaatgtagaccaagaagctcaaaaacatctgtgggatatttacaatacagacgaatacgttgcctatccagacgatgaattgcaagtcgcttctaccattgttgatgtttctaacggtaaagtcattgcccagctaggagcacgccatcagtcaagtaatgtttccttcggaattaaccaagcagtagaaacaaaccgcgactggggatcaactatgaaaccgatcacagactatgctcctgccttggagtacggtgtctacgagtcaactgccactatcgttcacgatgagccctataactaccctgggacaaatacccctgtttataactgggataggggctactttggcaacatcaccttgcaatacgccctgcaacaatcgcgaaacgtcccagccgtggaaactctaaacaaggtcggactcaaccgcgccaagactttcctaaatggtctcggaatcgactacccaagtattcactactcaaatgccatttcaagtaacacaaccgaatcagacaaaaaatatggagcaagtagtgaaaagatggctgctgcttacgctgcctttgcaaatggtggaacttactataaaccaatgtatatccataaagtcgtctttagtgatgggagtgaaaaagagttctctaatgtcggaactcgtgccatgaaagaaacgacagcctatatgatgaccgacatgatgaaaacagtcttgagttatggaactggacgaaatgcctatcttgcttggctccctcaggctggtaaaacaggaacctctaactatacagacgaggaaattgaaaaccacatcaagacctctcaatttgtagcacctgatgaactatttgctggctatacgcgtaaatattcaatggctgtatggacaggctattctaaccgtctgacaccacttgtaggcaatggccttacggtcgctgccaaagtttaccgctctatgatgacctacctgtctgaaggaagcaatccagaggattggaatataccagaggggctctacagaaatggagaattcgtatttaaaaatggtgctcgttctacgtggagctcacctgctccacaacaacccccatcaactgaaagttcaagctcatcatcagatagttcaacttcacagtctagctcaaccactccaagcacaaataatagtacgactaccaatcctaacaataatacgcaacaatcaaatacaacccctgatcaacaaaatcagaatcctcaaccagcacaaccataa

SEQ ID NO: 2049 - DNA, 2160 bp, Streptococcus pneumoniae strain URU-E159
atgaacaaaccaacgattctgcgcctaatcaagtatctgagcattagcttcttaagcttggttatcgcagccattgtcttaggcggaggagtttttttctactacgttagcaaggctcctagcctatccgagagtaaactagttgcaacaacttctagtaaaatctacgacaataaaaatcaactcattgctgacttgggttctgaacgccgcgtcaatgcccaagctaatgatattcccacagatttggttaaggcaatcgtttctatcgaagaccatcgcttcttcgaccacagggggattgattccatccgtatcctgggagctttcttgcgcaatctgcaaagtaattccctccaaggtggatcaactctcacccaacagttgattaagttgacttacttttcaacctcgacttccgaccagactatttctcgtaaggctcaggaagcttggttagcgattcagttagaacaaaaagcaaccaaacaggaaatcttgacctactatataaataaggtctacatgtctaatggcaactatggaatgcagacagcagctcaaaactactatggtaaagacctcaataatttaagtttacctcagttagccttgctggctggaatgcctcaggcaccaaaccaatatgacccctattcacatccagaagcagcccaagaccgccgaaacttggtcttatctgaaatgaaaaatcaaggttacatctctgctgaacagtatgagaaagcagtcaatacaccaattactgatggactacaaagtctcaaatcagcaagtaattaccctgcttacatggataattacctcaaggaggtcatcaatcaagtagaacaagaaactggctataaccttctaactactgggatggatgtttacacaaatgtagaccaagaagctcaaaaacatctgtgggatatctacaactccgatcaatacgtctcttaccctgacgatgatttgcaagtcgcatctacggtcgtagatgtttcaaatggtaaagtcatcgcccaacttggagctcgtcaccaagcaagtaacgtttcatttggtaccaaccaagctgtggaaaccaatcgtgactggggttctgctatgaaaccaatcaccgattatgcacctgccatagaatacggtgtttatgattccactgcaactatggttaatgatattccttataactatccgggaacaagcacacctgtctacaactgggatagagcatatttcggtaatattactctgcaatatgctcttcaacaatcacgaaatgtcacagccgttgagactttgaataaggtcggtctagatagagctaaaaccttccttaatggtcttggtatcgactatccaagcatgcattatgcaaacgccatttcaagtaatacaacagaatctaataaacaatacggagcaagtagtgaaaaaatggctgctgcttatgctgcctttgcaaatggtggcacttactataaaccaatgtatatccataaagtcgtcttcagtgatggaagtaaaaaagagttctctaatgtcggaactcgtgccatgaaggaaacgacagcctatatgatgaccgacatgatgaaaacagtcttgacttatggaactgggcgtggagcctatcttccttggcttcctcaagctggtaaaacaggaacctctaactatacagatgaggaagttgaaaaccacatcaagaacactggctatgtagctccagatgaaatgtttgttggttatactcgtaagtattctatggctgtatggacaggttattcgaatcgtttaactcctatcgttggagatggtttcctagttgcagctaaagtttatcgctcaatgataacgtatctatcagaagatactcatccagaagactggacgatgccagacggacttttcagaaatggagaattcgtatttaaaaatggtgctcgttctacgtggaactcacctgctccacaacaacccccatcaactgaaagttcaagctcatcatcagatagttcaacttcacagtctagctcaaccactccaagcacaaataatagtacgactaccaatcctaacaataatacgcaacaatcaaatacaacccctgatcaacaaaatcagaatcctcaaccagcacaaccataa

SEQ ID NO: 2050 - DNA, 930 bp, Streptococcus pneumoniae strains 8303; 35193
ctgtgggatatctacaactccgatcaatacgtctcttaccctgacgatgatttgcaagtcgcatctacggtcgtagatgtttcaaatggtaaagtcatcgcccaacttggagctcgtcaccaagcaagtaacgtttcatttggtaccaaccaagctgtggaaaccaatcgtgactggggttctgctatgaaaccaatcaccgattatgcacctgccatagaatacggtgtttatgattccactgcaactatggttaatgatattccttataactatccgggaacaagcacacctgtctacaactgggatagagcatatttcggtaatattactctgcaatatgctcttcaacaatcacgaaatgtcacagccgttgagactttgaataaggtcggtctagatagagctaaaaccttccttaatggtcttggtatcgactatccaagcatgcattatgcaaacgccatttcaagtaatacaacagaatctaataaacaatacggagcaagtagtgaaaaaatggctgctgcttatgctgcctttgcaaatggtggcacttactataaaccaatgtatatccataaagtcgtcttcagtgatggaagtaaaaaagagttctctaatgtcggaactcgtgccatgaaggaaacgacagcctatatgatgaccgacatgatgaaaacagtcttgacttatggaactgggcgtggagcctatcttccttggcttcctcaagctggtaaaacaggaacctctaactatacagatgaggaagttgaaaaccacatcaagaacactggctatgtagctccagatgaaatgtttgttggttatactcgtaagtattctatggctgtatggacaggttattcgaatcgtttaactcctatcgttggagatggtttcctagttgcagctaaagtttatcgc

SEQ ID NO: 2051 - DNA, 930 bp, Streptococcus pneumoniae strains 63509; M11
ctgtgggatatttacaatacagacgaatacgttgcctatccagatgatgacatgcaagtagcttcgactattgtagatgtatctaatggtaacgttattgcacaacttggtgctcgtcatcaagcaagtaatgtttcattcggcaccaaccaggctgtggagaccaatcgtgactggggttcttctatgaaaccaatcactgactatgctcccgctttagaatatggagtctatgactctactgcttctattgtacatgatgttccttataactatcctggcactgatactccagtctacaactgggatcatgtctactttggaaacattacaatccagtatgctcttcaacaatcacgaaatgtcacagccgttgagactttgaataaggtcggtctagatagagctaaaaccttccttaatggtcttggtatcgactatccaagcatgcattatgcaaacgccatttcaagtaacacaactgaatccaacaaacagtacggtgcaagtagtgaaaagatggctgctgcttatgccgccttttctaatggtggtatttaccacaaaccaatgtatatcaataaaatcgtcttcagtgatggtagtgaaaaagaattttctgatgctggtacacgagctatgaaagaaactactgcctatatgatgaccgaaatgatgaaaactgttttagcttacggaaccggacgtggtgcttacctaccatggcttccacaagcaggtaagacaggtacttctaactatactgacgacgaaattgaaaagtatatcaagaacactggctacgtagctccagatgaaatgtttgttggttatactcgtaagtattctatggctgtatggactggttactcaaatcgtttaactccaatcgtaggagatggtttcctagttgctgctaaggtttatcgc

SEQ ID NO: 2052 - DNA, 1195 bp, Streptococcus pneumoniae strain #22/HA5
gtctcttaccctgacgatgatttgcaagtcgcatctacggtcgtagatgtttccaatggtaaagtcatcgcccaacttggagctcgtcaccaagcaagtaacgtttcatttggtaccaaccaagctgtggaaaccaatcgtgactggggttcaacaatgaaaccaatcaccgattatgcacctgccatagaatacggtgtatatgattccactgcaactatggttaatgatattccttataactatccgggaacaagcacacctgtctacaactgggatcgagcatattttggtaatattactctgcaatatgcccttcaacaatcacgtaatgttacagcagttgaaacattaaacaaggttggtttagatcgagccaaaactttcctaaatggcttaggtatcgattacccaagcatacactatgctaacgccatttcaagtaatacaacagaatctaacaaacattacggtgcaagtagtgaaaaaatggctgctgcttatgccgcctttgctaatggtggtatttaccacaaaccaatgtatatcaataaaatcgtctttagtgatggtagtgagaaagaattttctgatgctggtacacgagctatgaaagaaactactgcctatatgatgaccgaaatgatgaaaactgttttagcttacggaaccggacgtggtgcttacctaccatggcttccacaagcaggtaagacaggtacttctaactatactgatgacgaaatcgaaaaacatatcaagaatactggctacgtagctccagatgaaatgtttgtaggctatactcgtaagtattctatggctgtatggactggttactcaaatcgtttaactccaattgttggagatggtttcctagttgctgctaaggtttatcgctcaatgatatcgtatctatcagaagatgaccaacctggagattggacgatgccagacggcctgttccgaaatggagaattcgtatttaaaaatggtgctcgttctacgtggaactcacctgctccacaacaacccccatcaactgaaagttcaagctcatcatcagatagttcaacttcacagtctagctcaaccactccaagcacaaataatagtacgactaccaatcctaacaataatacgcaacaatcaaatacaacccctgatcaacaaaatcagaatcctcaaccagcac

SEQ ID NO: 2053 - DNA, 930 bp, Streptococcus pneumoniae strain 17619
ctgtgggatatttacaatacagacgaatacgttgcctatccagacgatgaattgcaagtcgcttctaccattgttgatgtttctaacggtaaagtcattgcccagctaggagcacgccatcagtcaagtaatgtttccttcggaattaaccaagcagtagaaacaaaccgcgactggggatcaactatgaaaccgatcacagactatgctcctgccttggagtacggtgtctacgattcaactgctactatcgttcacgatgagccctataactaccctgggacaaatactcctgtttataactgggataggggctactttggcaacatcaccttgcaatacgccctgcaacaatcgcgaaacgtcccagccgtggaaactctaaacaaggtcggactcaaccgcgccaagactttcctaaatggtctcggaatcgactacccaagtattcactactcaaatgccatttcaagtaacacaaccgaatcagacaaaaaatatggagcaagtagtgaaaagatggctgctgcttacgctgcctttgcaaatggtggaacttactataaaccaatgtatatccataaagtcgtctttagtgatgggagtgaaaaagagttctctaatgtcggaactcgtgccatgaaggaaacgacagcctatatgatgaccgaaatgatgaaaacagtcttgagttatggaactggacgaaatgcctatcttgcttggcttcctcaagctggtaaaacaggtacctctaactatacagatgaagaaattgaaaaacacatcaaaaacactggctatgtagctccagatgaaacgtttgttggttatactcgtaagtattctatggctgtatggacaggttacacaaaccgtctcacaccaattgtgggggatggcttcacagttgctgccaaagtttaccgc

SEQ ID NO: 2054 - DNA, 306 bp, Streptococcus pneumoniae strain R6
cgtcgcattctctacggaatgaatgaattgggtgtgaccccagacaaaccccataaaaaatctgctcgtattacaggggatgtcatgggtaaataccacccacacggggattcctctatttatgaagccatggtccgtatggctcaatggtggagctaccgttacatgcttgtagatggtcatgggaattttggttccatggatggagatagtgctgccgctcaacgttataccgaggcacgtatgagcaagattgctctggaaatgcttcgtgatatcaacaaaaatacagttgatttcgttgat

SEQ ID NO: 2055 - DNA, 2472 bp, Streptococcus pneumoniae strain 7785
atgtctaacattcaaaacatgtccctggaggacatcatgggagagcgctttggtcgctactccaagtacattattcaagaccgggctttgccagatattcgtgatgggttgaagccggttcagcgccgtattctttattctatgaataaggatagcaatacttttgacaagagctaccgtaagtcggccaagtcagtcgggaacatcatggggaatttccacccacacggggattcttctatctatgatgccatggttcgtatgtcacagaactggaaaaatcgtgagattctagttgaaatgcacggtaataacggttctatggacggagatcctcctgcggctatgcgttatactgaggcacgtttgtctgaaattgcaggctaccttcttcaggatatcgagaaaaagacagttccttttgcatggaactttgacgatacggagaaagaaccaacggtcttgccagcagcctttccaaacctcttggtcaatggttcgactgggatttcggctggttatgccacagacattcctccccataatttagctgaggtcatagatgctgcagtttacatgattgaccacccaactgcaaagattgataaactcatggaattcttacctggaccagacttccctacaggggctattattcagggtcgtgatgaaatcaagaaagcttatgagactgggaaagggcgcgtggttgttcgttccaagactgaaattgaaaagctaaaaggtggtaaggaacaaatcgttattactgagattccttatgaaatcaataaggccaatctagtcaagaaaatcgatgatgttcgtgttaataacaaggtagctgggattgctgaggttcgtgatgagtctgaccgtgatggtcttcgtatcgctatcgaacttaagaaagacgctaatactgagcttgttctcaactacttatttaagtacaccgacctacaaatcaactacaactttaatatggtggcgattgacaatttcacacctcgtcaggttgggattgttccaatcctgtctagctacatcgctcaccgtcgagaagtgattttggcgcgttcacgctttgacaaagaaaaggctgagaaacgtctccatatcgtcgaaggtttgattcgtgtgatttcgattttggatgaagtcattgctcttatccgtgcttctgagaataaggcggacgccaaggaaaacctcaaagttagctatgattttacggaagaacaggctgaggctatcgtaactttgcaactgtaccgtttgaccaataccgatgtggttgtcttgcaggaagaagaagcagagcttcgtgagaagattgctatgctggcggctattatcggtgatgaaaggactatgtacaatctcatgaagaaagaacttcgtgaggtcaagaagaaatttgcaactcctcgtttgagttctttagaagacactgcgaaagcaattgagattgatacagctagtcttatcgctgaggaagatacctacgtcagcgtgaccaaggcaggttacatcaagcgtaccagtccacgttcctttgcggcttccaccttggaagaaattggcaagcgtgatgatgaccgtttgatttttgttcaatctgccaagacaacccagcacctcttgatgttcacaagtcttggaaatgtcatctacagaccaatccatgagttggcagatattcgttggaaggacatcggagagcatctgagccaaaccatcacaaactttgaaacgaatgaagaaatcctttatgtggaagtactggatcagtttgacgatgcgacaacctactttgcagtgactcgccttggtcaaatcaaacgggtagagcgaaaagaattcactccatggcggacctatagatctaagtctgtcaagtatgctaagctcaaagacgatacagatcagattgtagcagtggctccgattaaactagatgatgttgtcttggttagtcaaaatggttatgccctgcgtttcaatatcgaagaggttccggttgtcggtgctaaggcagcaggtgtcaaggctatgaatttgaaagaagatgatgtcctccaatctggctttatctgtaatacttcgtccttctacctcttgacccagcgtggaagcttgaaacgtgtttctattgaggaaattctagcaaccagccgtgccaaacgaggattacaagtcttgcgtgagttgaaaaacaaaccgcatcgtgtcttcttggcaggagcagttgcagagcaaggatttgttggcgatttcttcagtacggaagtggatgtgaacgaccaaactctgcttgtccaatccaataaaggaacaatctatgaaagccgattgcaagacttgaacttgtcagaacgcactagcaatggaagcttcatttctgacacgatttcagatgaagaagtttttgacgcttatcttcaggaagtagttactgaagataaataa

SEQ ID NO: 2056 - DNA, 1212 bp, Streptococcus pneumoniae strain StrR-16
aagctcaaaaacatctgtgggatatctacaactccgatcaatacgtctcttaccctgacgatgatttgcaagtcgcatctacggtcgtagatgtttcaaatggtaaagtcattgcccaacttggagctcgtcaccaagcaagtaacgtttcatttggcaccaaccaagctgtggaaaccaatcgtgactggggttcaacaatgaaaccaatcacagactatgctcctgccttggaatacggtgtctacgattcaactgctactatcgttcacgatgagccctataactatcctgggacagatacccctgtctataactgggataggggctactttggcaatatcaccttgcaatacgccctgcaacaatcgcgaaacgtcccagccgtggaaacactaaacaaggtcgggctcaaccgcgccaagacttttctaaatggtctcggaatcgactacccaagtattcactactcaaatgccatttcaagtaacacaaccgagtcagacaaaaaatatggagcaagtagtgaaaagatggctgctgcttacgctgcctttgcaaatggtggaacttactataaaccaatgtatatccataaagtcgtctttagtgatggaagtgaaaaagagttctctaatgtcggaactcgcgccatgaaagaaacgactgcttacatgatgacagaaatgatgaaaacagtcttgacgtacggaattggtcgtggtgcctacctgccttggcttcctcaagctggtaaaacaggtacttctaactatactgacgaagaaattgaaaagtatatcaagaacactggttacgtaactccagatgaaatgtttgtagggtatacccgtaaatatgcaatggctgtatggacaggctattctaaccgtctgacaccacttgtaggcgatggccttacggtcgctgccaaggtttaccgctctatgatgacctacctgtctgaaggaagcaatccagaggattggaatataccagaggggctctacagaaatggagaattcgtatttaaaaatggtgctcgttctacgtggagctcacctgctccacaacaacccccatcaactgaaagttcaagctcatcatcagatagttcaacttcacagtctagctcaaccactccaagcacaaataatagtacgactaccaatcctaacaataatacgcaacaatcaaatacaacccctgatc

SEQ ID NO: 2057 - DNA, 1242 bp, Streptococcus pneumoniae strain StrR-17
atgtagaccaagaagctcaaaaacatctgtgggatatttacaatacagacgaatacgttgcctatccagacgatgaattgcaagtcgcttctaccattgttgatgtttctaacgggaaagttattgctcagttaggttctcgtcaccaatcaagcaatgtttccttcggaatcaaccaagctgttgaaaccaaccgtgactggggttctgccatgaagccaatcacagactatgctcctgccttagagtatgacatctacgactcaactgcttcgattgtacatgatgttccttataactatccaggtactgatactcccctctacaactgggataaagtctactttggaaatattacaatccagtatgcacttcaacagtcacgtaatgtcacagccgttgagactttgaataaggtcggtctagatagagctaaaacctttcttaatggtcttggtatcgactatccaagcatgcattatgcaaacgccatttcaagtaatacgactgagtcaaacaaaaagtacggagcaagtagtgagaaaatggctgctgcttacgctgcttttgctaacggtggtatctaccataaaccaatgtatatcaacaaaatcgtctttagcgatggtagctcaaaagaatacgctgatcctggtactcgtgccatgaaagagacgaccgcctatatgatgacagaaatgatgaagactgtcttggcatacggaacgggtcgtggtgcttatctcccttggctacctcaagctggtaagactggtacatcaaactatacagatgatgaaattgaaaactacatcaaaaatactggttatgtagctccagacgaaatgtttgttggttatactcgcaaatattcaatggcggtatggacaggttactcaaaccgcctgactcctatcgttggtgatggcttctatgttgcagctaaggtttaccgttcaatgatgacttatctgtctgaggataacaaccctggcgactggactatgccagaaggtctctatcgaagtggtgagttcgtctttaaaaaaggtgctcgttctgcatggactgctcctgctccgcaacaggccccaacaccagaaagttcgagctcgacatcagaaagttcaacttcacagtcaagctcaactactccaagcacgaataatagtgcaaacaataataccaataaccagcaaccaaatacaacgcctggtcaacaaaaccagaaccaaaatcaga

SEQ ID NO: 2058 - DNA, 1225 bp, Streptococcus pneumoniae strain StrR-18
gaagctcaaaaacatctgtgggatatttacaatacagacgaatacgttgcctatccagacgatgaattgcaagtcgcttctaccattgttgatgtttctaacgggaaagttattgctcagttaggttctcgtcaccaatcaagcaatgtttccttcggaatcaaccaagctgttgaaaccaaccgtgactggggttctgccatgaagccaatcacagactatgctcctgccttagagtatgacatctacgactcaactgcttcgattgtacatgatgttccttataactatccaggtactgatactcccctctacaactgggataaagtctactttggaaatattacaatccagtatgcacttcaacagtcacgtaatgtcacagccgttgagactttgaataaggtcggtctagatagagctaaaacctttcttaatggtcttggtatcgactatccaagcatgcattatgcaaacgccatttcaagtaatacgactgagtcaaacaaaaagtacggagcaagtagtgagaaaatggctgctgcttacgctgcttttgctaacggtggtatctaccataaaccaatgtatatcaacaaaatcgtctttagcgatggtagctcaaaagaatacgctgatcctggtactcgtgccatgaaagagacgaccgcctatatgatgacagaaatgatgaagactgtcttggcatacggaacgggtcgtggtgcttatctcccttggctacctcaagctggtaagactggtacatcaaactatacagatgatgaaattgaaaactacatcaaaaatactggttatgtagctccagacgaaatgtttgttggttatactcgcaaatattcaatggcggtatggacaggttactcaaaccgcctgactcctatcgttggtgatggcttctatgttgcagctaaggtttaccgttcaatgatgacttatctgtctgaggataacaaccctggcgactggactatgccagaaggtctctatcgaagtggtgagttcgtctttaaaaaaggtgctcgttctgcatggactgctcctgctccgcaacaggccccaacaccagaaagttcgagctcgacatcagaaagttcaacttcacagtcaagctcaactactccaagcacgaataatagtgcaaacaataataccaataaccagcaaccaaatacaacgcctggtcaacaaaaccagaaccaaa

SEQ ID NO: 2059 - DNA, 554 bp, Streptococcus pneumoniae strain StrR-38
tggctactttggaaacattacagtccagtatgctcttcaacaatcacgaaatgtcacagccgttgagactttgaataaggtcggtctagatagagctaaaaccttcctcaatggacttggtatcgattatccaagcatgctttatgcaaacgccatttcaagtaacacaactgaatccaacaaaaagtacggagcaagtagtgaaaaaatggccgctgcctacgcagcttttgctaatggtggtacttaccacaaaccaatgtatatcaataaaatcgtctttagtgatggtagtgaaaaagaattttctgatgccggtactcgggctatgaaagaaactactgcctatatgatgaccgaaatgatgaaaactgtcttattatacggaaccggacgtggagcctacctaccttggcttccacaagcaggtaagacaggtacttctaactatactgacgaagaaattgaaaagtatatcaagaatgctggttacgtagctccagatgaaatgtttgttggttatacccgcaaatatgcaatggctgtttggacag

SEQ ID NO: 2060 - DNA, 1249 bp, Streptococcus pneumoniae strain StrR-57
caactgggatggatgtctacacaaatgtagaccaagaagctcaaaaacatctgtgggatatttacaatacagacgaatacgttgcctatccagacgatgaattgcaagtcgcttctaccattgttgatgtttctaacggtaaagtcattgcccagctaggagcacgccatcagtcaagtaatgtttccttcggaattaaccaagcagtagaaacaaaccgcgactggggatcaactatgaaaccgatcacagactatgctcctgccttggagtacggtgtctacgattcaactgctactatcgttcacgatgagccctataactaccctgggacaaatactcctgtttataactgggataggggctactttggcaacatcaccttgcaatacgccctgcaacaatcgcgaaacgtcccagccgtggaaactctaaacaaggtcggactcaaccgcgccaagactttcctaaatggtctaggaatcgactacccaagtattcactactcaaatgccatttcaagtaacacaaccgaatcagacaaaaaatatggagcaagtagtgaaaagatggctgctgcttacgctgcctttgcaaatggtggaacttactataaaccaatgtatatccataaagtcgtctttagtgatgggagtgaaaaagagttctctaatgtcggaactcgtgccatgaaggaaacgacagcctatatgatgaccgacatgatgaaaacagtcttgacttatggaactggacgaaatgcctatcttgcttggctccctcaggctggtaaaacaggaacctctaactatacagacgaggaaattgaaaaccacatcaagacctctcaatttgtagcacctgatgaactatttgctggctatacgcgtaaatattcaatggctgtatggacaggctattctaaccgtctgacaccacttgtaggcaatggccttacggtcgctgccaaagtttaccgctctatgatgacctacctgtctgaaggaagcaatccagaagattggaatataccagaggggctctacagaaatggagaattcgtatttaaaaatggtgctcgttctacgtggagctcacctgctccacaacaacccccatcaactgaaagttcaagctcatcatcagatagttcaacttcacagtctagctcaaccactccaagcacaaataatagtacgactaccaatcctaacaataatacgcaacaatcaaatacaacccctgatca

SEQ ID NO: 2061 - DNA, 579 bp, Streptococcus pneumoniae strain StrR-60
gaagttgaacagactggtcaccaagctccttcatatccgccaacactgcaattttcttgccaccttcattggctggaatggcagagaaagtctctaaaatcagtttcatagcagttggattggcattataaacatctgacaggatatctgctccattggctgctttcttccactcggtacggttacgcgtcaattcaagatgttggaaggccaaacgaatttgctcctctgaaactccttcttgcaaggcaacataggatgcaatcatagcatttgtcgcattgtacttgccagttactggcaaatcaagggcttgctctaagaaattgaccttgaaggtcagactatctttgcgctcaaccaagtcggtaattcccagctctgctccttgaccaaaacgaaccacctttttatcagttggcaaatagtcctctacgatagggtcagccggcgctaaaagcaaggaacctgaagccattccgtctgcaatttgcatttttcctttagcaatctcagaacggtctttgaaaaaggccaaatgagcttctccaaccaaggtcacgatggctgtatggacag

SEQ ID NO: 2062 - DNA, 1216 bp, Streptococcus pneumoniae strain StrR-63
aagctcaaaaacatctgtgggatatctacaactccgatcaatacgtctcttaccctgacgatgatttgcaagtcgcatctacggtcgtagatgtttcaaatggtaaagtcatcgcacaacttggtgctcgtcatcaagcaagtaatgtttcattcggtaccaaccaggccgtagaaaccaatcgtgactggggatcatcaatgaaaccaatcactgactatgctcccgctttagaatatggagtctatgactctactgcttctattgtacatgatgtcccttataactatcctggcactgatactccactctacaactgggatcatgtctactttggaaacattacaatccagtatgctcttcaacaatcacgaaatgtcacagccgttgagactttgaataaggtcggtctagatagagctaaaaccttccttaatggtcttggtatcgactatccaagcatgcattatgcaaacgccatttcaagtaacacaactgaatccaacaaaaaatatggtgcaagtagtgaaaaaatggctgctgcctacgctgcttttgctaatggtggtatttatcacaaaccaatgtatatcaataaaatcgtctttagtgatggtagcgaaaaagaattttctgatgctggtacacgagctatgaaagagactactgcctatatgatgactgaaatgatgaaaactgttttaacttacggaacaggacgtggagcctacctaccatggcttccacaagcaggtaagacaggtacttctaactatactgacgaagaaattgaaaagtatatcaagaacactggttacgtagctccagatgaaatgtttgtagggtatacccgtaaatatgcaatggctgtttggacaggatactcaaatcgtctaactccaatcatcggagatggtttccttgttgctggtaaagtctatcgttcaatgataacttacctttctgaagatgaccaacctggagattggacaatgccagatggcttgtatagaaatggagaattcgtatttaaaaatggtgctcgttctacgtggagctcacctgctccacaacaacccccatcaactgaaagttcaagctcatcatcagatagttcaacttcacagtctagctcaaccactccaagcacaaataatagtacgactaccaatcctaacaataatacgcaacaatcaaatacaacccctgatcaaca

SEQ ID NO: 2063 - DNA, 810 bp, Streptococcus pneumoniae ATCC 700673
aatacgtctcttaccctgacgatgatttgcaagtcgcatccacggtcgtagatgtttcaaatggtaaagtcatcgcccaacttggagctcgtcaccaagcaagtaacgtttcatttggtaccaaccaagctgtggaaaccaatcgtgactggggttcaacaatgaaacccatcaccgattatgcacctgccatagaatacggtgtatatgattccactgcaactatggttaatgatattccttataactatccgggaacaagcacacctgtctacaactgggatcgagcatattttggtaatattactctgcaatatgcccttcaacaatctcgtaacgtacccgccgttgagacactaaacaaggttggtttagatagagctaaaagtttcctaaatggtttaggaatcgactatcctgtaatgcactattcaaatgctatttcaagtaatactaccgaatctagtaaacagtacggggcaagtagtgaaaaaatggccactgcctatgccgcattcgcaaacggcggtatttaccacaaaccaatgtacatcaataaggttgtctttagcgatggtagcgaaaaagaattttctgaccctggcacaagagccatgaaagaaacgactgcttacatgatgacagagatgatgaaaacagtctggacttacggaactggtcgcggtgcctacctaccttggcttccacaagcaggtaaaacaggtacttctaactatactgacgaagaaattgaaaagtatatcaagaacactggttacgtagctccagatgaaatgtttgtagggtata

SEQ ID NO: 2064 - DNA, 782 bp, Streptococcus pneumoniae ATCC 700678
tcttaccctgacgatgatttgcaagtcgcatctacggtcgtagatgtttcaaatggtaaagtcatcgcccaacttggagctcgtcaccaagcaagtaacgtttcatttggtaccaaccaagctgtggaaaccaatcgtgactggggatcaactatgaaaccaatcacagactatgctcctgccttggagtacggtgtctacgattcaactgctactatcgttcacgatgagccctataactaccctgggacagatatccctctctataactgggatcgagcatatttcggtaatattactctgcaatatgcccttcaacaatctcgtaacgtacctgccgttgaaacactaaacaaggtcggtctagataaggctaaaaccttccttaatggtcttggtatcgactatccaagcatgcattatgcaaacgccatttcaagtaatacaactgaatccaacaaaaaatatggtgcaagtagtgaaaaaatagctaccgcctatgccgcattcgcaaatggtggtatttaccacaaaccaatgtacatcaataaagttgtctttagcgatggtagcgaaaaagaattttctgaccctggcacaagagccatgaaagaaacgactgcttacatgatgacagaaatgatgaaaacagtctggacgtacggaactggtcgtggtgcctacctgccttggcttcctcaagctggtaaaacaggtacctctaactatactgacgaagaaattgaaaagtatatcaagaacactggttacgtagctccaga

SEQ ID NO: 2065 - DNA, 22 bp, Artificial Sequence
  Synthetic DNA Sequence
ccaggacgtggaggcgatcaca

SEQ ID NO: 2066 - DNA, 22 bp, Artificial Sequence
  Synthetic DNA Sequence
caccgacagcgagccgatcaga

SEQ ID NO: 2067 - DNA, 18 bp, Artificial Sequence
  Synthetic DNA Sequence
agctgagccaattcatgg

SEQ ID NO: 2068 - DNA, 19 bp, Artificial Sequence
  Synthetic DNA Sequence
attcatggaccagaacaac

SEQ ID NO: 2069 - DNA, 18 bp, Artificial Sequence
  Synthetic DNA Sequence
cgctgtcggggttgaccc

SEQ ID NO: 2070 - DNA, 18 bp, Artificial Sequence
  Synthetic DNA Sequence
gttgacccacaagcgccg

SEQ ID NO: 2071 - DNA, 18 bp, Artificial Sequence
  Synthetic DNA Sequence
cgactgtcggcgctgggg

SEQ ID NO: 2072 - DNA, 3534 bp, Mycobacterium tuberculosis strain Rv
gtgctggaaggatgcatcttggcagattcccgccagagcaaaacagccgctagtcctagtccgagtcgcccgcaaagttcctcgaataactccgtacccggagcgccaaaccgggtctccttcgctaagctgcgcgaaccacttgaggttccgggactccttgacgtccagaccgattcgttcgagtggctgatcggttcgccgcgctggcgcgaatccgccgccgagcggggtgatgtcaacccagtgggtggcctggaagaggtgctctacgagctgtctccgatcgaggacttctccgggtcgatgtcgttgtcgttctctgaccctcgtttcgacgatgtcaaggcacccgtcgacgagtgcaaagacaaggacatgacgtacgcggctccactgttcgtcaccgccgagttcatcaacaacaacaccggtgagatcaagagtcagacggtgttcatgggtgacttcccgatgatgaccgagaagggcacgttcatcatcaacgggaccgagcgtgtggtggtcagccagctggtgcggtcgcccggggtgtacttcgacgagaccattgacaagtccaccgacaagacgctgcacagcgtcaaggtgatcccgagccgcggcgcgtggctcgagtttgacgtcgacaagcgcgacaccgtcggcgtgcgcatcgaccgcaaacgccggcaaccggtcaccgtgctgctcaaggcgctgggctggaccagcgagcagattgtcgagcggttcgggttctccgagatcatgcgatcgacgctggagaaggacaacaccgtcggcaccgacgaggcgctgttggacatctaccgcaagctgcgtccgggcgagcccccgaccaaagagtcagcgcagacgctgttggaaaacttgttcttcaaggagaagcgctacgacctggcccgcgtcggtcgctataaggtcaacaagaagctcgggctgcatgtcggcgagcccatcacgtcgtcgacgctgaccgaagaagacgtcgtggccaccatcgaatatctggtccgcttgcacgagggtcagaccacgatgaccgttccgggcggcgtcgaggtgccggtggaaaccgacgacatcgaccacttcggcaaccgccgcctgcgtacggtcggcgagctgatccaaaaccagatccgggtcggcatgtcgcggatggagcgggtggtccgggagcggatgaccacccaggacgtggaggcgatcacaccgcagacgttgatcaacatccggccggtggtcgccgcgatcaaggagttcttcggcaccagccagctgagccaattcatggaccagaacaacccgctgtcggggttgacccacaagcgccgactgtcggcgctggggcccggcggtctgtcacgtgagcgtgccgggctggaggtccgcgacgtgcacccgtcgcactacggccggatgtgcccgatcgaaacccctgaggggcccaacatcggtctgatcggctcgctgtcggtgtacgcgcgggtcaacccgttcgggttcatcgaaacgccgtaccgcaaggtggtcgacggcgtggttagcgacgagatcgtgtacctgaccgccgacgaggaggaccgccacgtggtggcacaggccaattcgccgatcgatgcggacggtcgcttcgtcgagccgcgcgtgctggtccgccgcaaggcgggcgaggtggagtacgtgccctcgtctgaggtggactacatggacgtctcgccccgccagatggtgtcggtggccaccgcgatgattcccttcctggagcacgacgacgccaaccgtgccctcatgggggcaaacatgcagcgccaggcggtgccgctggtccgtagcgaggccccgctggtgggcaccgggatggagctgcgcgcggcgatcgacgcggcgacgtcgtcgtcgcaagaaagcggcgtcatcgaggaggtgtcggccgactacatcactgtgatgcacgacaacggcacccggcgtacctaccggatgcgcaagtttgcccggtccaaccacggcacttgcgccaaccagtgccccatcgtggacgcgggcgaccgagtcgaggccggtcaggtgatcgccgacggtccctgtactgacgacggcgagatggcgctgggcaagaacctgctggtggccatcatgccgtgggagggccacaactacgaggacgcgatcatcctgtccaaccgcctggtcgaagaggacgtgctcacctcgatccacatcgaggagcatgagatcgatgctcgcgacaccaagctgggtgcggaggagatcacccgcgacatcccgaacatctccgacgaggtgctcgccgacctggatgagcggggcatcgtgcgcatcggtgccgaggttcgcgacggggacatcctggtcggcaaggtcaccccgaagggtgagaccgagctgacgccggaggagcggctgctgcgtgccatcttcggtgagaaggcccgcgaggtgcgcgacacttcgctgaaggtgccgcacggcgaatccggcaaggtgatcggcattcgggtgttttcccgcgaggacgaggacgagttgccggccggtgtcaacgagctggtgcgtgtgtatgtggctcagaaacgcaagatctccgacggtgacaagctggccggccggcacggcaacaagggcgtgatcggcaagatcctgccggttgaggacatgccgttccttgccgacggcaccccggtggacattattttgaacacccacggcgtgccgcgacggatgaacatcggccagattttggagacccacctgggttggtgtgcccacagcggctggaaggtcgacgccgccaagggggttccggactgggccgccaggctgcccgacgaactgctcgaggcgcatgcgaacgccattgtgtcgacgccggtgttcgacggcgcccaggaggccgagctgcagggcctgttgtcgtgcacgctgcccaaccgcgacggtgacgtgctggtcgacgccgacggcaaggccatgctcttcgacgggcgcagcggcgagccgttcccgtacccggtcacggttggctacatgtacatcatgaagctgcaccacctggtggacgacaagatccacgcccgctccaccgggccgtactcgatgatcacccagcagccgctgggcggtaaggcgcagttcggtggccagcggttcggggagatggagtgctgggccatgcaggcctacggtgctgcctacaccctgcaggagctgttgaccatcaagtccgatgacaccgtcggccgcgtcaaggtgtacgaggcgatcgtcaagggtgagaacatcccggagccgggcatccccgagtcgttcaaggtgctgctcaaagaactgcagtcgctgtgcctcaacgtcgaggtgctatcgagtgacggtgcggcgatcgaactgcgcgaaggtgaggacgaggacctggagcgggccgcggccaacctgggaatcaatctgtcccgcaacgaatccgcaagtttcgaggatcttgcgtaa

SEQ ID NO: 2073 - DNA, 38 bp, Artificial Sequence
  Synthetic DNA Sequence
ccgagcaacatgattgaaccatccaccaactggctcgg

SEQ ID NO: 2074 - DNA, 38 bp, Artificial Sequence
  Synthetic DNA Sequence
ccgagcaacatgattgaagcttccaccaactggctcgg

SEQ ID NO: 2075 - DNA, 41 bp, Artificial Sequence
  Synthetic DNA Sequence
ccgagccaggttctgaagtctctgcattattaggtgctcgg

SEQ ID NO: 2076 - DNA, 39 bp, Artificial Sequence
  Synthetic DNA Sequence
ccgagcygayaacattttcagattcacccargcgctcgg

SEQ ID NO: 2077 - DNA, 33 bp, Artificial Sequence
  Synthetic DNA Sequence
ccgagcaaccgatccagctccagctacgctcgg

SEQ ID NO: 2078 - DNA, 34 bp, Artificial Sequence
  Synthetic DNA Sequence
ccgagccttggtcttcggccaaatgaacgctcgg

SEQ ID NO: 2079 - DNA, 36 bp, Artificial Sequence
  Synthetic DNA Sequence
ccgagcgttcagttacttcagtccaagccggctcgg

SEQ ID NO: 2080 - DNA, 31 bp, Artificial Sequence
  Synthetic DNA Sequence
ccgagccgaagagggccaagatgtcgctcgg

SEQ ID NO: 2081 - DNA, 24 bp, Artificial Sequence
  Synthetic DNA Sequence
gratyrtyaaagttggtgaggaag

SEQ ID NO: 2082 - DNA, 22 bp, Artificial Sequence
  Synthetic DNA Sequence
cmacttcatcycgcttcgtacc

SEQ ID NO: 2083 - DNA, 44 bp, Artificial Sequence
  Synthetic DNA Sequence
  modified_base (27): i
ccgccgatgttccgtaaattacttgangaaggtcgagccggcgg

SEQ ID NO: 2084 - DNA, 38 bp, Artificial Sequence
  Synthetic DNA Sequence
cacgcgtcaacacccgtacaagtcgtcttttgcgcgtg

SEQ ID NO: 2085 - DNA, 24 bp, Artificial Sequence
  Synthetic DNA Sequence
caaactaaagaacatatcttgcta

SEQ ID NO: 2086 - DNA, 23 bp, Artificial Sequence
  Synthetic DNA Sequence
atataatttgcatcaccttcaag

SEQ ID NO: 2087 - DNA, 22 bp, Artificial Sequence
  Synthetic DNA Sequence
tcagctcgtgggattaggagag

SEQ ID NO: 2088 - DNA, 22 bp, Artificial Sequence
  Synthetic DNA Sequence
aggcttcacgctgttaggctga

SEQ ID NO: 2089 - DNA, 20 bp, Artificial Sequence
  Synthetic DNA Sequence
atgctgaacttattgacctt

SEQ ID NO: 2090 - DNA, 19 bp, Artificial Sequence
  Synthetic DNA Sequence
cgttactggagtcgaaatg

SEQ ID NO: 2091 - DNA, 39 bp, Artificial Sequence
  Synthetic DNA Sequence
cgcgacttgagatggaacttagtgagcttcttggtcgcg

SEQ ID NO: 2092 - DNA, 38 bp, Artificial Sequence
  Synthetic DNA Sequence
cgcgacgaaagaacttcctgaaggtcgtgcaggtccag

SEQ ID NO: 2093 - DNA, 20 bp, Artificial Sequence
  Synthetic DNA Sequence
tgttggcaatcgaagacacc

SEQ ID NO: 2094 - DNA, 24 bp, Artificial Sequence
  Synthetic DNA Sequence
ttcaatttcttgacctactttcaa

SEQ ID NO: 2095 - DNA, 18 bp, Artificial Sequence
  Synthetic DNA Sequence
cggtcgggttgaacgtgg

SEQ ID NO: 2096 - DNA, 34 bp, Artificial Sequence
  Synthetic DNA Sequence
cgcgaccggtaccacggccagtaatcgtgtcgcg

SEQ ID NO: 2097 - DNA, 1185 bp, Mycoplasma pneumoniae ATCC 29342
atggcaagagagaaatttgaccgatctaaaccccacgttaatgtaggtactattggccacattgaccacggtaaaacaactttaacagcagctatttgtactgtattagcaaaagaaggtaaatcagctgctactcgttacgaccaaatcgataaggctccggaagaaaaagcacggggaattacgattaactccgctcacgtggagtactcctctgacaagcgtcactatgctcacgttgactgtccaggacacgctgactacattaagaacatgattactggtgctgcacaaatggatggtgccattctagtagtttcagcaactgacagtgttatgccccaaacccgtgaacacattttgttggcccgccaagtgggtgtgccacgcatggtagtgttcctaaacaagtgtgacattgcaactgatgaagaagtgcaagagttagtagcagaagaggtacgtgacttattaacttcttacggctttgatggcaagaacacccctattatttatggttctgcacttaaagcgcttgaaggtgatcctaagtgggaagctaagatccatgatttaatgaatgcagttgatgaatggattccaactcctgaacgtgaagtggacaaacccttcttgttggcaatcgaagacaccatgacgattactggccgtggtaccgtggttaccggtcgggttgaacgtggtgaattgaaagtaggtcaagaaattgaaatcgttggtttacgtccaatccgtaaagcagttgttaccggaatcgaaatgttcaaaaaggaacttgattcagcaatggctggggacaacgctggggtattactccgtggtgtggaccgtaaagaagtggaacgtggtcaagtgttagctaaaccaggttcgattaaaccgcacaagaaatttaaagcggaaatctatgctttaaagaaggaagaaggtggtcgtcacaccggtttcttaaacggttaccgtccccaattctacttccgtactacagacgttactggttcgatttccctaccagaaaacaccgaaatggtgctaccaggtgacaatacctcgattacagttgaactaattgcaccaattgcttgtgaaaaaggtagtaagttctccatccgtgaaggtggtcgaacggttggtgctggttcagtcacggaagtgcttgaatag

SEQ ID NO: 2098 - DNA, 22 bp, Artificial Sequence
  Synthetic DNA Sequence
ctgagtcacaccgacaaacgtc

SEQ ID NO: 2099 - DNA, 22 bp, Artificial Sequence
  Synthetic DNA Sequence
ccaggactgaacgggatacgaa

SEQ ID NO: 2100 - DNA, 18 bp, Artificial Sequence
  Synthetic DNA Sequence
gcgagacgataggttgtc

SEQ ID NO: 2101 - DNA, 2609 bp, Mycobacterium tuberculosis strain H37Rv
cagcccgcgagcgtaacctggctgcgatttccggcgcggattttcgcagtgcggttacgctcggaaagcgcgggcctcgcccacgcggcggatgatgtcagcggggtggtcctcggcgacgacccggaccacgatccacccgtagcggtgctggactttctcgtgccggaggatgtctttccggtagtggtagcgactggtcagatggtggtcgccgtcatactcggccgcgaccttgatgtcttgccagcccatatccaaatgggcttccgcccagccccattcgttgcgcaccgcgatctgcgtctgggggcgcggaaagccggcgcggatcaacaacaagcgcagccaggtttccttgggggactgggcaccgccgtcgacgaggtccagagcggctcttgcggccttcatgccacggcggccccgatagcgctcgatcagcggctcgacgtcggccaccttcaaatcggtggcctgtatcagggcgtcgacggccgcgacggcggggtccaatggaaatcgactggtcaggtcgagcgccgttcgctccggtgtggtcacgcgcatgccctcgatgacgcagatctcgtcgggctcgatgcgctcttcccagacttgcagccccggggcacggcggcggttggtgtcgatgatcgcggcgggaagatccgcgtcgatccacttggcgccatggaaggcagaagccgagtagccggccagcacgccgcggcggcgcgagcgcagccacagcgcttttgcacgcaattgcgcggtcagttccacaccctgcggcacgtacacgtctttatgtagcgcgacatacctgctgcgcaattcgtagggcgtcaatacacccgcagccagggcctcgctgcccagaaagggatccgtcatggtcgaagtgtgctgagtcacaccgacaaacgtcacgagcgtaaccccagtgcgaaagttcccgccggaaatcgcagccacgttacgctcgtggacataccgatttcggcccggccgcggcgagacgataggttgtcggggtgactgccacagccactgaaggggccaaacccccattcgtatcccgttcagtcctggttaccggaggaaaccgggggatcgggctggcgatcgcacagcggctggctgccgacggccacaaggtggccgtcacccaccgtggatccggagcgccaaaggggctgtttggcgtcgaatgtgacgtcaccgacagcgacgccgtcgatcgcgccttcacggcggtagaagagcaccagggtccggtcgaggtgctggtgtccaacgccggcctatccgcggacgcattcctcatgcggatgaccgaggaaaagttcgagaaggtcatcaacgccaacctcaccggggcgttccgggtggctcaacgggcatcgcgcagcatgcagcgcaacaaattcggtcgaatgatattcataggttcggtctccggcagctggggcatcggcaaccaggccaactacgcagcctccaaggccggagtgattggcatggcccgctcgatcgcccgcgagctgtcgaaggcaaacgtgaccgcgaatgtggtggccccgggctacatcgacaccgatatgacccgcgcgctggatgagcggattcagcagggggcgctgcaatttatcccagcgaagcgggtcggcacccccgccgaggtcgccggggtggtcagcttcctggcttccgaggatgcgagctatatctccggtgcggtcatcccggtcgacggcggcatgggtatgggccactgacacaacacaaggacgcacatgacaggactgctggacggcaaacggattctggttagcggaatcatcaccgactcgtcgatcgcgtttcacatcgcacgggtagcccaggagcagggcgcccagctggtgctcaccgggttcgaccggctgcggctgattcagcgcatcaccgaccggctgccggcaaaggccccgctgctcgaactcgacgtgcaaaacgaggagcacctggccagcttggccggccgggtgaccgaggcgatcggggcgggcaacaagctcgacggggtggtgcattcgattgggttcatgccgcagaccgggatgggcatcaacccgttcttcgacgcgccctacgcggatgtgtccaagggcatccacatctcggcgtattcgtatgcttcgatggccaaggcgctgctgccgatcatgaaccccggaggttccatcgtcggcatggacttcgacccgagccgggcgatgccggcctacaactggatgacggtcgccaagagcgcgttggagtcggtcaacaggttcgtggcgcgcgaggccggcaagtacggtgtgcgttcgaatctcgttgccgcaggccctatccggacgctggcgatgagtgcgatcgtcggcggtgcgctcggcgaggaggccggcgcccagatccagctgctcgaggagggctgggatcagcgcgctccgatcggctggaacatgaaggatgcgacgccggtcgccaagacggtgtgcgcgctgctgtctgactggctgccggcgaccacgggtgacatcatctacgccgacggcggcgcgcacacccaattgctctag

SEQ ID NO: 2102 - DNA, 20 bp, Artificial Sequence
  Synthetic DNA Sequence
caccttcaccctgaccgacg

SEQ ID NO: 2103 - DNA, 23 bp, Artificial Sequence
  Synthetic DNA Sequence
cgaaccagcggaaatagttggac

SEQ ID NO: 2104 - DNA, 18 bp, Artificial Sequence
  Synthetic DNA Sequence
  modified_base (12): i
ctgggcatggcncgagtc

SEQ ID NO: 2105 - DNA, 3297 bp, Mycobacterium tuberculosis strain H37Rv
atgacacagtgcgcgagcagacgcaaaagcaccccaaatcgggcgattttgggggcttttgcgtctgctcgcgggacgcgctgggtggccaccatcgccgggctgattggctttgtgttgtcggtggcgacgccgctgctgcccgtcgtgcagaccaccgcgatgctcgactggccacagcgggggcaactgggcagcgtgaccgccccgctgatctcgctgacgccggtcgactttaccgccaccgtgccgtgcgacgtggtgcgcgccatgccacccgcgggcggggtggtgctgggcaccgcacccaagcaaggcaaggacgccaatttgcaggcgttgttcgtcgtcgtcagcgcccagcgcgtggacgtcaccgaccgcaacgtggtgatcttgtccgtgccgcgcgagcaggtgacgtccccgcagtgtcaacgcatcgaggtcacctctacccacgccggcaccttcgccaacttcgtcgggctcaaggacccgtcgggcgcgccgctgcgcagcggcttccccgaccccaacctgcgcccgcagattgtcggggtgttcaccgacctgaccgggcccgcgccgcccgggctggcggtctcggcgaccatcgacacccggttctccacccggccgaccacgctgaaactgctggcgatcatcggggcgatcgtggccaccgtcgtcgcactgatcgcgttgtggcgcctggaccagttggacgggcggggctcaattgcccagctcctcctcaggccgttccggcctgcatcgtcgccgggcggcatgcgccggctgattccggcaagctggcgcaccttcaccctgaccgacgccgtggtgatattcggcttcctgctctggcatgtcatcggcgcgaattcgtcggacgacggctacatcctgggcatggcccgagtcgccgaccacgccggctacatgtccaactatttccgctggttcggcagcccggaggatcccttcggctggtattacaacctgctggcgctgatgacccatgtcagcgacgccagtctgtggatgcgcctgccagacctggccgccgggctagtgtgctggctgctgctgtcgcgtgaggtgctgccccgcctcgggccggcggtggaggccagcaaacccgcctactgggcggcggccatggtcttgctgaccgcgtggatgccgttcaacaacggcctgcggccggagggcatcatcgcgctcggctcgctggtcacctatgtgctgatcgagcggtccatgcggtacagccggctcacaccggcggcgctggccgtcgttaccgccgcattcacactgggtgtgcagcccaccggcctgatcgcggtggccgcgctggtggccggcggccgcccgatgctgcggatcttggtgcgccgycatcgcctggtcggcacgttgccgttggtgtcgccgatgctggccgccggcaccgtcatcctgaccgtggtgttcgccgaccagaccctgtcaacggtgttggaagccaccagggttcgcgccaaaatcgggccgagccaggcgtggtataccgagaacctgcgttactactacctcatcctgcccaccgtcgacggttcgctgtcgcggcgcttcggctttttgatcaccgcgctatgcctgttcaccgcggtgttcatcatgttgcggcgcaagcgaattcccagcgtggcccgcggaccggcgtggcggctgatgggcgtcatcttcggcaccatgttcttcctgatgttcacgcccaccaagtgggtgcaccacttcgggctgttcgccgccgtaggggcggcgatggccgcgctgacgacggtgttggtatccccatcggtgctgcgctggtcgcgcaaccggatggcgttcctggcggcgttattcttcctgctggcgttgtgttgggccaccaccaacggctggtggtatgtctccagctacggtgtgccgttcaacagcgcgatgccgaagatcgacgggatcacagtcagcacaatctttttcgccctgtttgcgatcgccgccggctatgcggcctggctgcacttcgcgccccgcggcgccggcgaagggcggctgatccgcgcgctgacgacagccccggtaccgatcgtggccggtttcatggcggcggtgttcgtcgcgtccatggtggccgggatcgtgcgacagtacccgacctactccaacggctggtccaacgtgcgggcgtttgtcggcggctgcggactggccgacgacgtactcgtcgagcctgataccaatgcgggtttcatgaagccgctggacggcgattcgggttcttggggccccttgggcccgctgggtggagtcaacccggtcggcttcacgcccaacggcgtaccggaacacacggtggccgaggcgatcgtgatgaaacccaaccagcccggcaccgactacgactgggatgcgccgaccaagctgacgagtcctggcatcaatggttctacggtgccgctgccctatgggctcgatcccgcccgggtaccgttggcaggcacctacaccaccggcgcacagcaacagagcacactcgtctcggcgtggtatctcctgcctaagccggacgacgggcatccgctggtcgtggtgaccgccgcgggcaagatcgccggcaacagcgtgctgcacgggtacacccccgggcagactgtggtgctcgaatacgccatgccgggacccggagcgctggtacccgccgggcggatggtgcccgacgacctatacggagagcagcccaaggcgtggcgcaacctgcgcttcgcccgagcaaagatgcccgccgatgccgtcgcggtccgggtggtggccgaggatctgtcgctgacaccggaggactggatcgcggtgaccccgccgcgggtaccggacctgcgctcactgcaggaatatgtgggctcgacgcagccggtgctgctggactgggcggtcggtttggccttcccgtgccagcagccgatgctgcacgccaatggcatcgccgaaatcccgaagttccgcatcacaccggactactcggctaagaagctggacaccgacacgtgggaagacggcactaacggcggcctgctcgggatcaccgacctgttgctgcgggcccacgtcatggccacctacctgtcccgcgactgggcccgcgattggggttccctgcgcaagttcgacaccctggtcgatgcccctcccgcccagctcgagttgggcaccgcgacccgcagcggcctgtggtcaccgggcaagatccgaattggtccatag

SEQ ID NO: 2106 - DNA, 31 bp, Artificial Sequence
  Synthetic DNA Sequence
gcgagcagagcacgccctcctcgccgctcgc

SEQ ID NO: 2107 - DNA, 32 bp, Artificial Sequence
  Synthetic DNA Sequence
gcgagctccccatctctggttggcacgctcgc

SEQ ID NO: 2108 - DNA, 41 bp, Artificial Sequence
  Synthetic DNA Sequence
gcgggcaacttcrtcaagaaggttggttacaacccgcccgc

SEQ ID NO: 2109 - DNA, 38 bp, Artificial Sequence
  Synthetic DNA Sequence
gcgggcccaatctctggttggaayggtgacaagcccgc

SEQ ID NO: 2110 - DNA, 41 bp, Artificial Sequence
  Synthetic DNA Sequence
gcgggcccttaacgatttcagcgaatctggattcagcccgc

SEQ ID NO: 2111 - DNA, 41 bp, Artificial Sequence
  Synthetic DNA Sequence
gcgggcatgattgaagccaccaccaacgcttcctggcccgc

SEQ ID NO: 2112 - DNA, 43 bp, Artificial Sequence
  Synthetic DNA Sequence
gcgggcttgatgaagttttgggtttccttgacaatttgcccgc

SEQ ID NO: 2113 - DNA, 41 bp, Artificial Sequence
  Synthetic DNA Sequence
gcgggcacaagggttggactaaggaaaccaaggcagcccgc

SEQ ID NO: 2114 - DNA, 41 bp, Artificial Sequence
  Synthetic DNA Sequence
gcgggcatcgatgctattgaaccacctgtcagaccgcccgc

SEQ ID NO: 2115 - DNA, 39 bp, Artificial Sequence
  Synthetic DNA Sequence
gcgggcttgatgatttcctcgaatctagattgggcccgc

SEQ ID NO: 2116 - DNA, 39 bp, Artificial Sequence
  Synthetic DNA Sequence
gcgggcggtaagtccaccggtaagaccttgttggcccgc

SEQ ID NO: 2117 - DNA, 36 bp, Artificial Sequence
  Synthetic DNA Sequence
gcgggcgacgccattgagccaccttcgagagcccgc

SEQ ID NO: 2118 - DNA, 42 bp, Artificial Sequence
  Synthetic DNA Sequence
gcgggctccttgacaatttcttcgtatctgttcttggcccgc

SEQ ID NO: 2119 - DNA, 40 bp, Artificial Sequence
  Synthetic DNA Sequence
gcgggcttacaaccctaaggctgttccattcgttgcccgc

SEQ ID NO: 2120 - DNA, 41 bp, Artificial Sequence
  Synthetic DNA Sequence
gcgggcagaaaccaaggctggtaaggttaccggtagcccgc

SEQ ID NO: 2121 - DNA, 31 bp, Artificial Sequence
  Synthetic DNA Sequence
  modified_base (8): i
cgaccgcnagccgcacaccaagttccggtcg

SEQ ID NO: 2122 - DNA, 35 bp, Artificial Sequence
  Synthetic DNA Sequence
ccgagcgaatgtaggagtccagggtctctgctcgg

SEQ ID NO: 2123 - DNA, 19 bp, Artificial Sequence
  Synthetic DNA Sequence
tctaccactgaagcattac

SEQ ID NO: 2124 - DNA, 20 bp, Artificial Sequence
  Synthetic DNA Sequence
taggtactgtaggtttattg

SEQ ID NO: 2125 - DNA, 37 bp, Artificial Sequence
  Synthetic DNA Sequence
cacgcggattttgaatctcttcctctagtagcgcgtg

SEQ ID NO: 2126 - DNA, 18 bp, Artificial Sequence
  Synthetic DNA Sequence
atatcagagactgatgag

SEQ ID NO: 2127 - DNA, 22 bp, Artificial Sequence
  Synthetic DNA Sequence
tagcatattcagagaatattgt

SEQ ID NO: 2128 - DNA, 37 bp, Artificial Sequence
  Synthetic DNA Sequence
caacgctggagaatctatatttgtagaaactgcgttg

SEQ ID NO: 2129 - DNA, 7733 bp, Clostridium difficile strain VPI 10463
atgtctttaatatctaaagaagagttaataaaactcgcatatagcattagaccaagagaaaatgagtataaaactatactaactaatttagacgaatataataagttaactacaaacaataatgaaaataaatatttgcaattaaaaaaactaaatgaatcaattgatgtttttatgaataaatataaaacttcaagcagaaatagagcactctctaatctaaaaaaagatatattaaaagaagtaattcttattaaaaattccaatacaagccctgtagaaaaaaatttacattttgtatggataggtggagaagtcagtgatattgctcttgaatacataaaacaatgggctgatattaatgcagaatataatattaaactgtggtatgatagtgaagcattcttagtaaatacactaaaaaaggctatagttgaatcttctaccactgaagcattacagctactagaggaagagattcaaaatcctcaatttgataatatgaaattttacaaaaaaaggatggaatttatatatgatagacaaaaaaggtttataaattattataaatctcaaatcaataaacctacagtacctacaatagatgatattataaagtctcatctagtatctgaatataatagagatgaaactgtattagaatcatatagaacaaattctttgagaaaaataaatagtaatcatgggatagatatcagggctaatagtttgtttacagaacaagagttattaaatatttatagtcaggagttgttaaatcgtggaaatttagctgcagcatctgacatagtaagattattagccctaaaaaattttggcggagtatatttagatgttgatatgcttccaggtattcactctgatttatttaaaacaatatctagacctagctctattggactagaccgttgggaaatgataaaattagaggctattatgaagtataaaaaatatataaataattatacatcagaaaactttgataaacttgatcaacaattaaaagataattttaaactcattatagaaagtaaaagtgaaaaatctgagatattttctaaattagaaaatttaaatgtatctgatcttgaaattaaaatagctttcgctttaggcagtgttataaatcaagccttgatatcaaaacaaggttcatatcttactaacctagtaatagaacaagtaaaaaatagatatcaatttttaaaccaacaccttaacccagccatagagtctgataataacttcacagatactactaaaatttttcatgattcattatttaattcagctaccgcagaaaactctatgtttttaacaaaaatagcaccatacttacaagtaggttttatgccagaagctcgctccacaataagtttaagtggtccaggagcttatgcgtcagcttactatgatttcataaatttacaagaaaatactatagaaaaaactttaaaagcatcagatttaatagaatttaaattcccagaaaataatctatctcaattgacagaacaagaaataaatagtctatggagctttgatcaagcaagtgcaaaatatcaatttgagaaatatgtaagagattatactggtggatctctttctgaagacaatggggtagactttaataaaaatactgccctcgacaaaaactatttattaaataataaaattccatcaaacaatgtagaagaagctggaagtaaaaattatgttcattatatcatacagttacaaggagatgatataagttatgaagcaacatgcaatttattttctaaaaatcctaaaaatagtattattatacaacgaaatatgaatgaaagtgcaaaaagctactttttaagtgatgatggagaatctattttagaattaaataaatataggatacctgaaagattaaaaaataaggaaaaagtaaaagtaacctttattggacatggtaaagatgaattcaacacaagcgaatttgctagattaagtgtagattcactttccaatgagataagttcatttttagataccataaaattagatatatcacctaaaaatgtagaagtaaacttacttggatgtaatatgtttagttatgattttaatgttgaagaaacttatcctgggaagttgctattaagtattatggacaaaattacttccactttacctgatgtaaataaaaattctattactataggagcaaatcaatatgaagtaagaattaatagtgagggaagaaaagaacttctggctcactcaggtaaatggataaataaagaagaagctattatgagcgatttatctagtaaagaatacattttttttgattctatagataataagctaaaagcaaagtccaagaatattccaggattagcatcaatatcagaagatataaaaacattattacttgatgcaagtgttagtcctgatacaaaatttattttaaataatcttaagcttaatattgaatcttctattggggattacatttattatgaaaaattagagcctgttaaaaatataattcacaattctatagatgatttaatagatgagttcaatctacttgaaaatgtatctgatgaattatatgaattaaaaaaattaaataatctagatgagaagtatttaatatcttttgaagatatctcaaaaaataattcaacttactctgtaagatttattaacaaaagtaatggtgagtcagtttatgtagaaacagaaaaagaaattttttcaaaatatagcgaacatattacaaaagaaataagtactataaagaatagtataattacagatgttaatggtaatttattggataatatacagttagatcatacttctcaagttaatacattaaacgcagcattctttattcaatcattaatagattatagtagcaataaagatgtactgaatgatttaagtacctcagttaaggttcaactttatgctcaactatttagtacaggtttaaatactatatatgactctatccaattagtaaatttaatatcaaatgcagtaaatgatactataaatgtactacctacaataacagaggggatacctattgtatctactatattagacggaataaacttaggtgcagcaattaaggaattactagacgaacatgacccattactaaaaaaagaattagaagctaaggtgggtgttttagcaataaatatgtcattatctatagctgcaactgtagcttcaattgttggaataggtgctgaagttactattttcttattacctatagctggtatatctgcaggaataccttcattagttaataatgaattaatattgcatgataaggcaacttcagtggtaaactattttaatcatttgtctgaatctaaaaaatatggccctcttaaaacagaagatgataaaattttagttcctattgatgatttagtaatatcagaaatagattttaataataattcgataaaactaggaacatgtaatatattagcaatggaggggggatcaggacacacagtgactggtaatatagatcactttttctcatctccatctataagttctcatattccttcattatcaatttattctgcaataggtatagaaacagaaaatctagatttttcaaaaaaaataatgatgttacctaatgctccttcaagagtgttttggtgggaaactggagcagttccaggtttaagatcattggaaaatgacggaactagattacttgattcaataagagatttatacccaggtaaattttactggagattctatgcttttttcgattatgcaataactacattaaaaccagtttatgaagacactaatattaaaattaaactagataaagatactagaaacttcataatgccaactataactactaacgaaattagaaacaaattatcttattcatttgatggagcaggaggaacttactctttattattatcttcatatccaatatcaacgaatataaatttatctaaagatgatttatggatatttaatattgataatgaagtaagagaaatatctatagaaaatggtactattaaaaaaggaaagttaataaaagatgttttaagtaaaattgatataaataaaaataaacttattataggcaatcaaacaatagatttttcaggcgatatagataataaagatagatatatattcttgacttgtgagttagatgataaaattagtttaataatagaaataaatcttgttgcaaaatcttatagtttgttattgtctggggataaaaattatttgatatccaatttatctaatactattgagaaaatcaatactttaggcctagatagtaaaaatatagcgtacaattacactgatgaatctaataataaatattttggagctatatctaaaacaagtcaaaaaagcataatacattataaaaaagacagtaaaaatatattagaattttataatgacagtacattagaatttaacagtaaagattttattgctgaagatataaatgtatttatgaaagatgatattaatactataacaggaaaatactatgttgataataatactgataaaagtatagatttctctatttctttagttagtaaaaatcaagtaaaagtaaatggattatatttaaatgaatccgtatactcatcttaccttgattttgtgaaaaattcagatggacaccataatacttctaattttatgaatttatttttggacaatataagtttctggaaattgtttgggtttgaaaatataaattttgtaatcgataaatactttacccttgttggtaaaactaatcttggatatgtagaatttatttgtgacaataataaaaatatagatatatattttggtgaatggaaaacatcgtcatctaaaagcactatatttagcggaaatggtagaaatgttgtagtagagcctatatataatcctgatacgggtgaagatatatctacttcactagatttttcctatgaacctctctatggaatagatagatatataaataaagtattgatagcacctgatttatatacaagtttaataaatattaataccaattattattcaaatgagtactaccctgagattatagttcttaacccaaatacattccacaaaaaagtaaatataaatttagatagttcttcttttgagtataaatggtctacagaaggaagtgactttattttagttagatacttagaagaaagtaataaaaaaatattacaaaaaataagaatcaaaggtatcttatctaatactcaatcatttaataaaatgagtatagattttaaagatattaaaaaactatcattaggatatataatgagtaattttaaatcatttaattctgaaaatgaattagatagagatcatttaggatttaaaataatagataataaaacttattactatgatgaagatagtaaattagttaaaggattaagcaagtaattgacaataataagtattatttcaatcctgacactgctatcatctcaaaaggttggcagactgttaatggtagtagatactactttgatactgataccgctattgcctttaatggttataaaactattgatggtaaacacttttattttgatagtgattgtgtagtgaaaataggtgtgtttagtacctctaatggatttgaatattttgcacctgctaatacttataataataacatagaaggtcaggctatagtttatcaaagtaaattcttaactttgaatggtaaaaaatattactttgataataactcaaaagcagttaccggattgcaaactattgatagtaaaaaatattactttaatactaacactgctgaagcagctactggatggcaaactattgatggtaaaaaatattactttaatactaacactgctgaagcagctactggatggcaaactattgatggtaaaaaatattactttaatactaacactgctatagcttcaactggttatacaattattaatggtaaacatttttattttaatactgatggtattatgcagataggagtgtttaaaggacctaatggatttgaatattttgcacctgctaatacggatgctaacaacatagaaggtcaagctatactttaccaaaatgaattcttaactttgaatggtaaaaaatattactttggtagtgactcaaaagcagttactggatggagaattattaacaataagaaatattactttaatcctaataatgctattgctgcaattcatctatgcactataaataatgacaagtattactttagttatgatggaattcttcaaaatggatatattactattgaaagaaataatttctattttgatgctaataatgaatctaaaatggtaacaggagtatttaaaggacctaatggatttgagtattttgcacctgctaatactcacaataataacatagaaggtcaggctatagtttaccagaacaaattcttaactttgaatggcaaaaaatattattttgataatgactcaaaagcagttactggatggcaaaccattgatggtaaaaaatattactttaatcttaacactgctgaagcagctactggatggcaaactattgatggtaaaaaatattactttaatcttaacactgctgaagcagctactggatggcaaactattgatggtaaaaaatattactttaatactaacactttcatagcctcaactggttatacaagtattaatggtaaacatttttattttaatactgatggtattatgcagataggagtgtttaaaggacctaatggatttgaatactttgcacctgctaatacggatgctaacaacatagaaggtcaagctatactttaccaaaataaattcttaactttgaatggtaaaaaatattactttggtagtgactcaaaagcagttaccggactgcgaactattgatggtaaaaaatattactttaatactaacactgctgttgcagttactggatggcaaactattaatggtaaaaaatactactttaatactaacacttctatagcttcaactggttatacaattattagtggtaaacatttttattttaatactgatggtattatgcagataggagtgtttaaaggacctgatggatttgaatactttgcacctgctaatacagatgctaacaatatagaaggtcaagctatacgttatcaaaatagattcctatatttacatgacaatatatattattttggtaataattcaaaagcggctactggttgggtaactattgatggtaatagatattacttcgagcctaatacagctatgggtgcgaatggttataaaactattgataataaaaatttttactttagaaatggtttacctcagataggagtgtttaaagggtctaatggatttgaatactttgcacctgctaatacggatgctaacaatatagaaggtcaagctatacgttatcaaaatagattcctacatttacttggaaaaatatattactttggtaataattcaaaagcagttactggatggcaaactattaatggtaaagtatattactttatgcctgatactgctatggctgcagctggtggacttttcgagattgatggtgttatatatttctttggtgttgatggagtaaaagcccctgggatatatggctaa

SEQ ID NO: 2130 - DNA, 7101 bp, Clostridium difficile strain VPI 10463
atgagtttagttaatagaaaacagttagaaaaaatggcaaatgtaagatttcgtactcaagaagatgaatatgttgcaatattggatgctttagaagaatatcataatatgtcagagaatactgtagtcgaaaaatatttaaaattaaaagatataaatagtttaacagatatttatatagatacatataaaaaatctggtagaaataaagccttaaaaaaatttaaggaatatctagttacagaagtattagagctaaagaataataatttaactccagttgagaaaaatttacattttgtttggattggaggtcaaataaatgacactgctattaattatataaatcaatggaaagatgtaaatagtgattataatgttaatgttttttatgatagtaatgcatttttgataaacacattgaaaaaaactgtagtagaatcagcaataaatgatacacttgaatcatttagagaaaacttaaatgaccctagatttgactataataaattcttcagaaaacgtatggaaataatttatgataaacagaaaaatttcataaactactataaagctcaaagagaagaaaatcctgaacttataattgatgatattgtaaagacatatctttcaaatgagtattcaaaggagatagatgaacttaatacctatattgaagaatccttaaataaaattacacagaatagtggaaatgatgttagaaactttgaagaatttaaaaatggagagtcattcaacttatatgaacaagagttggtagaaaggtggaatttagctgctgcttctgacatattaagaatatctgcattaaaagaaattggtggtatgtatttagatgttgatatgttaccaggaatacaaccagacttatttgagtctatagagaaacctagttcagtaacagtggatttttgggaaatgacaaagttagaagctataatgaaatacaaagaatatataccagaatatacctcagaacattttgacatgttagacgaagaagttcaaagtagttttgaatctgttctagcttctaagtcagataaatcagaaatattctcatcacttggtgatatggaggcatcaccactagaagttaaaattgcatttaatagtaagggtattataaatcaagggctaatttctgtgaaagactcatattgtagcaatttaatagtaaaacaaatcgagaatagatataaaatattgaataatagtttaaatccagctattagcgaggataatgattttaatactacaacgaatacctttattgatagtataatggctgaagctaatgcagataatggtagatttatgatggaactaggaaagtatttaagagttggtttcttcccagatgttaaaactactattaacttaagtggccctgaagcatatgcggcagcttatcaagatttattaatgtttaaagaaggcagtatgaatatccatttgatagaagctgatttaagaaactttgaaatctctaaaactaatatttctcaatcaactgaacaagaaatggctagcttatggtcatttgacgatgcaagagctaaagctcaatttgaagaatataaaaggaattattttgaaggttctcttggtgaagatgataatcttgatttttctcaaaatatagtagttgacaaggagtatcttttagaaaaaatatcttcattagcaagaagttcagagagaggatatatacactatattgttcagttacaaggagataaaattagttatgaagcagcatgtaacttatttgcaaagactccttatgatagtgtactgtttcagaaaaatatagaagattcagaaattgcatattattataatcctggagatggtgaaatacaagaaatagacaagtataaaattccaagtataatttctgatagacctaagattaaattaacatttattggtcatggtaaagatgaatttaatactgatatatttgcaggttttgatgtagattcattatccacagaaatagaagcagcaatagatttagctaaagaggatatttctcctaagtcaatagaaataaatttattaggatgtaatatgtttagctactctatcaacgtagaggagacttatcctggaaaattattacttaaagttaaagataaaatatcagaattaatgccatctataagtcaagactctattatagtaagtgcaaatcaatatgaagttagaataaatagtgaaggaagaagagaattattggatcattctggtgaatggataaataaagaagaaagtattataaaggatatttcatcaaaagaatatatatcatttaatcctaaagaaaataaaattacagtaaaatctaaaaatttacctgagctatctacattattacaagaaattagaaataattctaattcaagtgatattgaactagaagaaaaagtaatgttaacagaatgtgagataaatgttatttcaaatatagatacgcaaattgttgaggaaaggattgaagaagctaagaatttaacttctgactctattaattatataaaagatgaatttaaactaatagaatctatttctgatgcactatgtgacttaaaacaacagaatgaattagaagattctcattttatatcttttgaggacatatcagagactgatgagggatttagtataagatttattaataaagaaactggagaatctatatttgtagaaactgaaaaaacaatattctctgaatatgctaatcatataactgaagagatttctaagataaaaggtactatatttgatactgtaaatggtaagttagtaaaaaaagtaaatttagatactacacacgaagtaaatactttaaatgctgcattttttatacaatcattaatagaatataatagttctaaagaatctcttagtaatttaagtgtagcaatgaaagtccaagtttacgctcaattatttagtactggtttaaatactattacagatgcagccaaagttgttgaattagtatcaactgcattagatgaaactatagacttacttcctacattatctgaaggattacctataattgcaactattatagatggtgtaagtttaggtgcagcaatcaaagagctaagtgaaacgagtgacccattattaagacaagaaatagaagctaagataggtataatggcagtaaatttaacaacagctacaactgcaatcattacttcatctttggggatagctagtggatttagtatacttttagttcctttagcaggaatttcagcaggtataccaagcttagtaaacaatgaacttgtacttcgagataaggcaacaaaggttgtagattattttaaacatgtttcattagttgaaactgaaggagtatttactttattagatgataaaataatgatgccacaagatgatttagtgatatcagaaatagattttaataataattcaatagttttaggtaaatgtgaaatctggagaatggaaggtggttcaggtcatactgtaactgatgatatagatcacttcttttcagcaccatcaataacatatagagagccacacttatctatatatgacgtattggaagtacaaaaagaagaacttgatttgtcaaaagatttaatggtattacctaatgctccaaatagagtatttgcttgggaaacaggatggacaccaggtttaagaagcttagaaaatgatggcacaaaactgttagaccgtataagagataactatgaaggtgagttttattggagatattttgcttttatagctgatgctttaataacaacattaaaaccaagatatgaagatactaatataagaataaatttagatagtaatactagaagttttatagttccaataataactacagaatatataagagaaaaattatcatattctttctatggttcaggaggaacttatgcattgtctctttctcaatataatatgggtataaatatagaattaagtgaaagtgatgtttggattatagatgttgataatgttgtgagagatgtaactatagaatctgataaaattaaaaaaggtgatttaatagaaggtattttatctacactaagtattgaagagaataaaattatcttaaatagccatgagattaatttttctggtgaggtaaatggaagtaatggatttgtttctttaacattttcaattttagaaggaataaatgcaattatagaagttgatttattatctaaatcatataaattacttatttctggcgaattaaaaatattgatgttaaattcaaatcatattcaacagaaaatagattatataggattcaatagcgaattacagaaaaatataccatatagctttgtagatagtgaaggaaaagagaatggttttattaatggttcaacaaaagaaggtttatttgtatctgaattacctgatgtagttcttataagtaaggtttatatggatgatagtaagccttcatttggatattatagtaataatttgaaagatgtcaaagttataactaaagataatgttaatatattaacaggttattatcttaaggatgatataaaaatctctctttctttgactctacaagatgaaaaaactataaagttaaatagtgtgcatttagatgaaagtggagtagctgagattttgaagttcatgaatagaaaaggtaatacaaatacttcagattctttaatgagctttttagaaagtatgaatataaaaagtattttcgttaatttcttacaatctaatattaagtttatattagatgctaattttataataagtggtactacttctattggccaatttgagtttatttgtgatgaaaatgataatatacaaccatatttcattaagtttaatacactagaaactaattatactttatatgtaggaaatagacaaaatatgatagtggaaccaaattatgatttagatgattctggagatatatcttcaactgttatcaatttctctcaaaagtatctttatggaatagacagttgtgttaataaagttgtaatttcaccaaatatttatacagatgaaataaatataacgcctgtatatgaaacaaataatacttatccagaagttattgtattagatgcaaattatataaatgaaaaaataaatgttaatatcaatgatctatctatacgatatgtatggagtaatgatggtaatgattttattcttatgtcaactagtgaagaaaataaggtgtcacaagttaaaataagattcgttaatgtttttaaagataagactttggcaaataagctatcttttaactttagtgataaacaagatgtacctgtaagtgaaataatcttatcatttacaccttcatattatgaggatggattgattggctatgatttgggtctagtttctttatataatgagaaattttatattaataactttggaatgatggtatctggattaatatatattaatgattcattatattattttaaaccaccagtaaataatttgataactggatttgtgactgtaggcgatgataaatactactttaatccaattaatggtggagctgcttcaattggagagacaataattgatgacaaaaattattatttcaaccaaagtggagtgttacaaacaggtgtatttagtacagaagatggatttaaatattttgccccagctaatacacttgatgaaaacctagaaggagaagcaattgattttactggaaaattaattattgacgaaaatatttattattttgatgataattatagaggagctgtagaatggaaagaattagatggtgaaatgcactattttagcccagaaacaggtaaagcttttaaaggtctaaatcaaataggtgattataaatactatttcaattctgatggagttatgcaaaaaggatttgttagtataaatgataataaacactattttgatgattctggtgttatgaaagtaggttacactgaaatagatggcaagcatttctactttgctgaaaacggagaaatgcaaataggagtatttaatacagaagatggatttaaatattttgctcatcataatgaagatttaggaaatgaagaaggtgaagaaatctcatattctggtatattaaatttcaataataaaatttactattttgatgattcatttacagctgtagttggatggaaagatttagaggatggttcaaagtattattttgatgaagatacagcagaagcatatataggtttgtcattaataaatgatggtcaatattattttaatgatgatggaattatgcaagttggatttgtcactataaatgataaagtcttctacttctctgactctggaattatagaatctggagtacaaaacatagatgacaattatttctatatagatgataatggtatagttcaaattggtgtatttgatacttcagatggatataaatattttgcacctgctaatactgtaaatgataatatttacggacaagcagttgaatatagtggtttagttagagttggggaagatgtatattattttggagaaacatatacaattgagactggatggatatatgatatggaaaatgaaagtgataaatattatttcaatccagaaactaaaaaagcatgcaaaggtattaatttaattgatgatataaaatattattttgatgagaagggcataatgagaacgggtcttatatcatttgaaaataataattattactttaatgagaatggtgaaatgcaatttggttatataaatatagaagataagatgttctattttggtgaagatggtgtcatgcagattggagtatttaatacaccagatggatttaaatactttgcacatcaaaatactttggatgagaattttgagggagaatcaataaactatactggttggttagatttagatgaaaagagatattattttacagatgaatatattgcagcaactggttcagttattattgatggtgaggagtattattttgatcctgatacagctcaattagtgattagtgaatag

SEQ ID NO: 2131 - DNA, 25 bp, Artificial Sequence
  Synthetic DNA Sequence
aagcmattgttgtaaattttgaaag

SEQ ID NO: 2132 - DNA, 23 bp, Artificial Sequence
  Synthetic DNA Sequence
tcatatccatagcaatagttcta

SEQ ID NO: 2133 - DNA, 42 bp, Artificial Sequence
  Synthetic DNA Sequence
ccacgcacawaaacttgttttagaagtagcagcwcagcgtgg

SEQ ID NO: 2134 - DNA, 17 bp, Artificial Sequence
  Synthetic DNA Sequence
cgcgtgaagcttctgtg

SEQ ID NO: 2135 - DNA, 20 bp, Artificial Sequence
  Synthetic DNA Sequence
tctcgccgttattcagtttc

SEQ ID NO: 2136 - DNA, 44 bp, Artificial Sequence
  Synthetic DNA Sequence
ccaacgcgtcctcaatcatttctaacttctatggccggcgttgg

SEQ ID NO: 2137 - DNA, 889 bp, Pseudomonas putida
atgatcaccggtgctgcccagatggacggcgcgatcctggtttgctcggccgccgatggtccgatgccrcaaacccgtgagcacatcctgctgtcccgtcaggtaggcgttccgtacatcgtggtcttcctgaacaaggccgacctggtagacgacgctgagctgctggaactggtcgagatggaagttcgcgacctgctgtccacctacgacttcccaggcgacgacactccgatcatcatcggttccgctcgtatggccctggaaggcaaagacgacaacgaaatgggcactaccgctgtcaagaagctggtagaaactctggatgcctacatccctgagccagttcgtgccatcgaccagccgttcctgatgccgatcgaagacgtgttctcgatctcgggtcgtggtaccgttgttaccggtcgtatcgagcgtggcatcgttcgcgttcaggatccgctggaaatcgttggtctgcgtgacaccaccaccaccacctgcaccggtgttgagatgttccgcaagctgctggacgaaggtcgtgctggcgagaactgcggcgttctgctgcgtggtaccaagcgtgacgacgttgagcgtggccaggttctggtcaagccaggttcggtcaagccgcacaccaagttcaccgcagaagtctacgtcctgtcgaaggaagaaggcggccgtcacactccgttcttcaaaggctaccgtccacagttctacttccgtaccactgacgtgaccggtaactgcgaactgccggaaggcgttgaaatggtaatgccaggtgacaacattcagatgactgttaccctgatcaagaccatcgcaatggaagacggtctgcgcttcgctatccgtgaaggcggtcgtaccgtcg

SEQ ID NO: 2138 - DNA, 900 bp, Pseudomonas aeruginosa strain PAO-1
aacatgatcaccggtgctgcccagatggacggcgcgatcctggtttgctcggctgccgacggccccatgccgcagacccgcgagcacatcctgctgtcccgccaggtaggcgttccctacatcgtcgtgttcctgaacaaggccgacatggtcgacgacgccgagctgctggaactggtcgagatggaagttcgcgatctgctgaacacctacgacttcccgggcgacgacactccgatcatcatcggttccgcgctgatggcgctggaaggcaaggatgacaacggcatcggcgtaagcgccgtgcagaagctggtagagaccctggactcctacattccggagccggttcgtgccatcgaccagccgttcctgatgccgatcgaagacgtgttctcgatctccggccgcggtaccgtggtaaccggtcgtgtagagcgcggcatcatcaaggtccaggaagaagtggaaatcgtcggcatcaaggcgaccaccaagactacctgcaccggcgttgaaatgttccgcaagctgctcgacgaaggtcgtgctggtgagaacgttggtatcctgctgcgtggcaccaagcgtgaagacgtagagcgtggccaggttctggccaagccgggcaccatcaagccgcacaccaagttcgagtgcgaagtgtacgtgctgtccaaggaagaaggtggtcgtcacaccccgttcttcaagggctaccgtccgcagttctacttccgtaccaccgacgtgaccggtaactgcgaactgccggaaggcgtagagatggtaatgccgggcgacaacatcaagatggttgtcaccctgatcgctccgatcgccatggaagatggcctgcgcttcgcgatccgcgaaggcggccgtaccgttggcgccggc

SEQ ID NO: 2139 - DNA, 1398 bp, Campylobacter jejuni NCTC 11168
atgcaaggatttatttcacaggtattaggtccggttgttgatgtagattttaacgactatttgcctcaaattaatgaagcaattgttgtaaattttgaaagcgaaggaaaaaaacataaacttgttttagaagtagcagctcatttaggagataatagagttagaactattgctatggatatgacagatggtttggtaaggggcttaaaagctgaggctttaggtgctcccattagtgttcctgttggtgagaaagttttaggaagaattttcaatgttactggagatttgatcgatgaaggtgaagaaatttctttcgataaaaaatgggcaattcatagagatccaccagcttttgaagatcaaagcacaaaaagtgagatttttgaaacagggattaaagttgtagatttacttgctccttatgcaaaaggtggtaaagtaggtctttttggtggtgcaggtgttggtaaaactgttattattatggagcttattcacaatgttgcatttaagcatagcggctattctgtatttgcaggtgtgggtgagagaactcgtgaaggaaatgacctttataatgaaatgaaagaaagtaatgttttagacaaagttgctctatgttatggacaaatgaatgaaccaccaggggcaagaaatcgtattgctttaacaggtttaacaatggctgagtattttagagatgaaatgggtcttgatgtgcttatgtttattgataatatctttagattttcacaatcaggttctgaaatgtcagcacttttaggaagaattccatcagctgtgggttatcaaccaaccttagcaagtgaaatgggtaaattccaagaaagaattacttcaactaaaaaaggctcaatcacttcagttcaagctgtttacgttccagctgatgacttaacagacccagctccagcaactgtttttgctcacttagatgctacaacggttttaaatagagctattgctgaaaagggtatttatcctgcagttgacccacttgactcaacttcaagaatgcttgacccaaatatcattggagaagaacattataaagttgctcgtggtgttcaatcagtgcttcaaaaatacaaagatttacaagatatcatcgccattttaggtatggatgagcttagcgaagaggataaacttgtagttgaaagagcaagaaagattgaaaaattcttatcacaaccatttttcgttgcagaagttttcacaggtagcccaggaaaatatataagccttgaagatacaatagcaggatttaagggaattttagaaggtaaatatgatcatttaccagaaaatgctttctatatggttggaaatatagatgaagctattgcaaaagcggataaattaaaaggttaa

SEQ ID NO: 2140 - DNA, 2157 bp, Streptococcus pneumoniae strain 670
atgaacaaaccaacgattctgcgcctaatcaagtatctgagcattagcttcttaagcttggttatcgcagccattgtcttaggcggaggagtttttttctactacgttagcaaggctcctagcctatccgagagtaaactagttgcaacaacttctagtaaaatctacgacaataaaaatcaactcattgctgacttgggttctgaacgccgcgtcaatgcccaagctaatgatattcccacagatttggttaaggcaatcgtttctatcgaagaccatcgcttcttcgaccacagggggattgattccatccgtatcctgggagctttcttgcgcaatctgcaaagtaattccctccaaggtggatcaactctcacccaacagttgattaagttgacttacttttcaacctcgacttccgaccagactatttctcgtaaggctcaggaagcttggttagcgattcagttagaacaaaaagcaaccaaacaggaaatcttgacctactatataaataaggtctacatgtctaatggcaactatggaatgcagacagcagctcaaaactactatggtaaagacctcaataatttaagtttacctcagttagccttgctggctggaatgcctcaggcaccaaaccaatatgacccctattcacatccagaagcagcccaagaccgccgaaacttggtcttatctgaaatgaaaaatcaaggttacatctctgctgaacagtatgagaaagcagtcaatacaccaattactgatggactacaaagtctcaaatcagcaagtaattaccctgcttacatggataattacctcaaggaggtcatcaatcaagtagaacaagaaactggctataaccttctaactactgggatggatgtttacacaaatgtagaccaagaagctcaaaaacatctgtgggatatctacaactccgatcaatacgtctcttaccctgacgatgatttgcaagtcgcatctacggtcgtagatgtttcaaatggtaaagtcatcgcccaacttggagctcgtcaccaagcaagtaacgtttcatttggtaccaaccaagctgtggaaaccaatcgtgactggggttctgctatgaaaccaatcaccgattatgcacctgccatagaatacggtgtttatgattccactgcaactatggttaatgatattccttataactatccgggaacaagcacacctgtctacaactgggatagagcatatttcggtaatattactctgcaatatgctcttcaacaatcacgaaatgtcacagccgttgagactttgaataaggtcggtctagatagagctaaaaccttccttaatggtcttggtatcgactatccaagcatgcattatgcaaacgccatttcaagtaatacaacagaatctaataaacaatacggagcaagtagtgaaaaaatggctgctgcttatgctgcctttgccaacggtggaatttaccacaaacccatgtatatcaataaggtcgtcttcagtgacggtagtaaaaaagaattttcagatgtaggtacacgagctatgaaagaaacaactgcttacatgatgaccgaaatgatgaaaactgtcttggcatacggaactggtcgtggagcctatctcccatggttagcgcaagctggtaagacaggtacttctaactacacagatgatgaaattgaaaaacacatcaagaacactggctatgtagctccagatgaaatgtttgttggttatactcgtaagtattctatggctgtatggacaggttattcgaatcgtttaactcctatcgttggagatggtttcctagttgcagctaaagtttatcgctcaatgataacgtatctatcagaagatactcatccagaagactggacgatgccagacggacttttcagaaacggggaatttgtattcaaaaatggagctcgttctacgtggagctcacctgctccacaacaacccccatcaactgaaagttcaagctcatcatcagatagttcaacttcacagtctagctcaaccactccaagcacaaataatagtacgactaccgatcctaacaataatacgcaacaatcaaatacaacccctgatcaacaaaatcagaatcctcaaccagcacaacca

SEQ ID NO: 2141 - DNA, 18 bp, Artificial Sequence
  Synthetic DNA Sequence
caccagtcacagaaaagc

SEQ ID NO: 2142 - DNA, 20 bp, Artificial Sequence
  Synthetic DNA Sequence
gccttaatttcggatagtgc

SEQ ID NO: 2143 - DNA, 25 bp, Artificial Sequence
  Synthetic DNA Sequence
gagaaagagcccaattatctaatgt

SEQ ID NO: 2144 - DNA, 3075 bp, Staphylococcus aureus strain J2870
ttgacaaagaaatatttaaacacccagaatgaaatatcagcattttggaatactcaaaagatatttaaaaaatcaattgacaatagaaaaggacaggaaagttttgttttttatgacggccccccaactgcaaatggccttcctcatgctggccatgttcttggaagagtaatcaaggatttagttgcaagattaaaaactatgcaaggtttttatgtagaaagaaaagcaggatgggatacccatggcttaccagttgaattagaggttgaaaaaaaaattggaattaaaggaaaacaagacattgaaaagtatggaatagaaaattttataaatgaatgtaaaaaaagtgtatttaattatgaaaaagaatggcgggatttttctaaagatttaggatactgggttgacatggactccccctatataactcttgagaataattatattgaaagtgtatggaatatattatctacattccataaaaaaggactattatataagggacataaggtgactccttattgtacacatgatcaaaccgctttaagttctcatgaagtagcgcaaggctataaaaacgttaaagatttatcagctgttgttaaatttcaacttacaaatagtaaagatacttatttcttaagttggactaccactccctggactttgcctgcaaatgtagcattagctataaataaagatcttaattattcaaaaattcgggtagaaaatgagtattatatcttagctacagatctaattaattctataataactgaaaaatacgaaattattgataccttttcaggaagtaatttaattaatttaaaatacattcctccttttgaaagcgacggtttagttaatgcatattacgttgttgatggagaatttgttactaactcagaaggaactggtattgttcatatagcaccagctcatggggaagatgactaccaattggttttagagcgtgatttggatttcttaaatgttataacaagagaaggagtatataatgataggttccctgaattagttggtaataaagctaaaaatagtgatatagaaatcataaaattattatccaaaaaacaacttttatataaaaaacaaaaatatgagcataattatcctcattgttggagatgtggtaatcctttgatatattatgcgatggaaggttggtttattaaaacaactaattttaagaatgaaattattaacaataataataatatagagtggtttccttctcatattaaggaagggagaatgggaaatttcttagaaaatatggttgattggaacattggtagaaatagatattggggaacaccattaaatgtatggatttgcaatgattgtaatcacgaatacgcaccaagtagtattaaggatttacaaaataattccatcaataaaattgatgaagatattgagttgcatagaccttatgttgataatatcactcttagttgccctaagtgtaatgggaaaatgtctcgagtagaagaagtaatcgatgtttggtttgatagcggctctatgccgtttgctcagcatcattatccttttgataaccagaaaatttttaatcaacactttccagctgattttattgcagaaggagttgatcaaacgagaggctggttttacagtttactagtaatttctactattctaaaaggaaaatcttcttataaacgtgctttatctttaggacatattctagacagtaatggtaaaaaaatgtctaaaagtaaaggaaacgttattaatccaactgaattaattaataagtacggagccgattctttaagatgggccttaatttcggatagtgctccatggaataacaaaagattctcagaaaatatagtagctcagaccaaatcgaaatttatagatacgcttgataatatttataaattttataatatgtataataaaatagatcactataatcctaataatgaaattacaaaaagtagaaatacattagataattgggctctttctcgcttaaacaccttaataaaagaaagtaatatttatgtaaataattacgatttcacttccgcagccagattaattaacgaatataccaatacaataagtaattggtatatcggagattcgagaggacgattttgggaacaaggaatttctaacgataaaaaagatgcgtacaatacgctttatgaaattttaacaactttatcaagactagtggctccatttgttccatttatatctgaaaaaatccattataatttgactggaaaaagtgtgcatttacaagattatccacaatataaagaaagttttattaatcaagcattggaagatgaaatgcataccgttataaaaattgtagaattatctagacaggctcgcaaaaatgcagatttaaaaattaagcaacctttatcgaaaatggtgattaaacctaatagtcaattaaacttaagttttttacctaattactattcaataataaaagacgaattaaatataaaaaacattgaattaactgataatattaatgactatattacctatgagcttaaattgaatttttcttctgtgggaccaaaactagggaacaaaacgaaaaatattcaaacattgatagactccctatcagagtatgataaaaaaagtttaattgagtctaataacttcaaaagtttatcttctgatgctgagttaactaaggatgattttataattaaaaccttacctaaggatagttatcaactcagtgaagataatgactgcgttatattattagataaaaatttatctcctgaattaattcgcgaaggacatgctagagagctcattagattaattcaacaattaagaaaaaagaaaaatttaccaataaatcaacgtattgatatttatatcggtgtaactggggaattattagaatcaataaaaaccaataaaaatatgtttaaagaaaatttcgtgattaaaaatatacacttaaatgttatagatgaatatgaaaatactattcattttaataataaagaaataaaaatttccttattatattaa

SEQ ID NO: 2145 - DNA, 22 bp, Artificial Sequence
  Synthetic DNA Sequence
gcaagatgtggcgtgttacggt

SEQ ID NO: 2146 - DNA, 23 bp, Artificial Sequence
  Synthetic DNA Sequence
ggggcgaagaagttgtccatatt

SEQ ID NO: 2147 - DNA, 660 bp, Escherichia coli
atggagaaaaaaatcactggatataccaccgttgatatatcccaatggcatcgtaaagaacattttgaggcatttcagtcagttgctcaatgtacctataaccagaccgttcagctggatattacggcctttttaaagaccgtaaagaaaaataagcacaagttttatccggcctttattcacattcttgcccgcctgatgaatgctcatccggaattccgtatggcaatgaaagacggtgagctggtgatatgggatagtgttcacccttgttacaccgttttccatgagcaaactgaaacgttttcatcgctctggagtgaataccacgacgatttccggcagtttctacacatatattcgcaagatgtggcgtgttacggtgaaaacctggcctatttccctaaagggtttattgagaatatgtttttcgtctcagccaatccctgggtgagtttcaccagttttgatttaaacgtggccaatatggacaacttcttcgcccccgttttcaccatgggcaaatattatacgcaaggcgacaaggtgctgatgccgctggcgattcaggttcatcatgccgtctgtgatggcttccatgtcggcagaatgcttaatgaattacaacagtactgcgatgagtggcagggcggggcgtaa

SEQ ID NO: 2148 - DNA, 22 bp, Artificial Sequence
  Synthetic DNA Sequence
cagattaaatgcggattcagcc

SEQ ID NO: 2149 - DNA, 23 bp, Artificial Sequence
  Synthetic DNA Sequence
atcaggtaaatcatcagcggata

SEQ ID NO: 2150 - DNA, 642 bp, Escherichia coli strain K12
atgaattttacccggattgacctgaatacctggaatcgcagggaacactttgccctttatcgtcagcagattaaatgcggattcagcctgaccaccaaactcgatattaccgctttgcgtaccgcactggcggagacaggttataagttttatccgctgatgatttacctgatctcccgggctgttaatcagtttccggagttccggatggcactgaaagacaatgaacttatttactgggaccagtcagacccggtctttactgtctttcataaagaaaccgaaacattctctgcactgtcctgccgttattttccggatctcagtgagtttatggcaggttataatgcggtaacggcagaatatcagcatgataccagattgtttccgcagggaaatttaccggagaatcacctgaatatatcatcattaccgtgggtgagttttgacggatttaacctgaacatcaccggaaatgatgattattttgccccggtttttacgatggcaaagtttcagcaggaaggtgaccgcgtattattacctgtttctgtacaggttcatcatgcagtatgtgatggctttcatgcagcacggtttattaatacacttcagctgatgtgtgataacatactgaaataa

SEQ ID NO: 2151 - DNA, 23 bp, Artificial Sequence
  Synthetic DNA Sequence
atatttcagcattaccttgggtt

SEQ ID NO: 2152 - DNA, 23 bp, Artificial Sequence
  Synthetic DNA Sequence
tacacaactcttgtagccgatta

SEQ ID NO: 2153 - DNA, 642 bp, Shigella flexneri
atgaactatacaaaatttgatgtaaaaaattgggttcgccgtgagcattttgagttttatcggcatcgtttaccatgtggttttagcttaacaagcaaaattgatatcacgacgttaaaaaagtcattggatgattcagcgtataagttttatccggtaatgatctatctgattgctcaggccgtgaatcaatttgatgagttgagaatggcgataaaagatgatgaattgatcgtatgggattcagtcgacccacaattcaccgtattccatcaagaaacagagacattttcagcactgagttgcccatactcatccgatattgatcaatttatggtgaattatttatcggtaatggaacgttataaaagtgataccaagttatttcctcaaggggtaacaccagaaaatcatttaaatatttcagcattaccttgggttaattttgatagctttaatttaaatgttgctaattttaccgattattttgcacccattataacaatggcaaaatatcagcaagaaggggatagactgttattgccgctctcagtacaggttcatcatgcagtttgtgatggcttccatgttgcacgctttattaatcggctacaagagttgtgtaacagtaaattaaaataa

SEQ ID NO: 2154 - DNA, 20 bp, Artificial Sequence
  Synthetic DNA Sequence
cgccattcagagtttaggac

SEQ ID NO: 2155 - DNA, 23 bp, Artificial Sequence
  Synthetic DNA Sequence
ttccataccgttgcgtatcactt

SEQ ID NO: 2156 - DNA, 624 bp, Clostridium perfringens strain CP590
atggtatttgaaaaaattgataaaaatagttggaacagaaaagagtattttgaccactactttgcaagtgtaccttgtacatacagcatgaccgttaaagtggatatcacacaaataaaggaaaagggaatgaaactatatcctgcaatgctttattatattgcaatgattgtaaaccgccattcagagtttaggacggcaatcaatcaagatggtgaattggggatatatgatgagatgataccaagctatacaatatttcacaatgatactgaaacattttccagcctttggactgagtgtaagtctgactttaaatcatttttagcagattatgaaagtgatacgcaacggtatggaaacaatcatagaatggaaggaaagccaaatgctccggaaaacatttttaatgtatctatgataccgtggtcaaccttcgatggctttaatctgaatttgcagaaaggatatgattatttgattcctatttttactatggggaaatattataaagaagataacaaaattatacttcctttggcaattcaagttcatcacgcagtatgtgacggatttcacatttgccgttttgtaaacgaattgcaggaattgataaatagttaa

SEQ ID NO: 2157 - DNA, 27 bp, Artificial Sequence
  Synthetic DNA Sequence
ccacagaaattgatattagtgttttat

SEQ ID NO: 2158 - DNA, 21 bp, Artificial Sequence
  Synthetic DNA Sequence
tcgctattgtaaccagttcta

SEQ ID NO: 2159 - DNA, 651 bp, Staphylococcus aureus
atgaactttaataaaattgatttagacaattggaagagaaaagagatatttaatcattatttgaaccaacaaacgacttttagtataaccacagaaattgatattagtgttttataccgaaacataaaacaagaaggatataaattttaccctgcatttattttcttagtgacaagggtgataaactcaaatacagcttttagaactggttacaatagcgacggagagttaggttattgggataagttagagccactttatacaatttttgatggtgtatctaaaacattctctggtatttggactcctgtaaagaatgacttcaaagagttttatgatttatacctttctgatgtagagaaatataatggttcggggaaattgtttcccaaaacacctatacctgaaaatgctttttctctttctattattccatggacttcatttactgggtttaacttaaatatcaataataatagtaattaccttctacccattattacagcaggaaaattcattaataaaggtaattcaatatatttaccgctatctttacaggtacatcattctgtttgtgatggttatcatgcaggattgtttatgaactctattcaggaattgtcagataggcctaatgactggcttttataa

SEQ ID NO: 2160 - DNA, 23 bp, Artificial Sequence
  Synthetic DNA Sequence
ttttgaacactattttaaccagc

SEQ ID NO: 2161 - DNA, 23 bp, Artificial Sequence
  Synthetic DNA Sequence
gatttaacttatcccaataacct

SEQ ID NO: 2162 - DNA, 648 bp, Staphylococcus aureus
atgacttttaatattatcaaattagaaaattgggatagaaaagaatattttgaacactattttaaccagcaaactacgtatagcattactaaagaaattgatattactttgtttaaagatatgataaaaaagaaaggatatgaaatttatccttctttgatttatgcaattatggaagttgtaaataaaaataaagtgtttagaacaggaattaatagtgagaataaattaggttattgggataagttaaatcctttgtatacagtttttaataagcaaactgaaaaatttactaacatttggactgaatctgataacaacttcacttctttttataataattataaaaatgacttgcttgaatataaagataaagaagaaatgtttcctaaaaaaccgatacctgaaaacaccataccgatttcaatgattccttggattgattttagttcatttaatttaaacattggtaacaatagcaactttttattgcctattattacgataggtaaattttatagtgagaataataaaatttatataccagttgctttgcagcttcatcatgctgtatgtgatggttaccatgcttcattatttatgaatgaatttcaagatataattcataaggtagatgattggatttag

SEQ ID NO: 2163 - DNA, 24 bp, Artificial Sequence
  Synthetic DNA Sequence
accttcatcctaccgatgtgggtt

SEQ ID NO: 2164 - DNA, 23 bp, Artificial Sequence
  Synthetic DNA Sequence
caacgacaccagcactgccattg

SEQ ID NO: 2165 - DNA, 1215 bp, Salmonella typhimurium strain H3380
atgaccaccacacgccccgcgtgggcctatacgctgccggcagcactgctgctgatggctcctttcgacatcctcgcttcactggcgatggatatttatctccctgtcgttccagcgatgcccggcatcctgaacacgacgcccgctatgatccaactcacgttgagcctctatatggtgatgctcggcgtgggccaagtgatttttggtccgctctcagacagaatcgggcgacggccaattctacttgcgggcgcaacggctttcgtcattgcgtctctgggagcagcttggtcttcaactgcaccggcctttgtcgctttccgtctacttcaagcagtgggcgcgtcggccatgctggtggcgacgttcgcgacggttcgcgacgtttatgccaaccgtcctgagggtgtcgtcatctacggccttttcagttcgatgctggcgttcgtgcctgcgctcggccctatcgccggagcattgatcggcgagttcttgggatggcaggcgatattcattactttggctatactggcgatgctcgcactcctaaatgcgggtttcaggtggcacgaaacccgccctctggatcaagtcaagacgcgccgatctgtcttgccgatcttcgcgagtccggctttttgggtttacactgtcggctttagcgccggtatgggcaccttcttcgtcttcttctcgacggctccccgtgtgctcataggccaagcggaatattccgagatcggattcagctttgccttcgccactgtcgcgcttgtaatgatcgtgacaacccgtttcgcgaagtcctttgtcgtcagatggggcatcgcaggatgcgtggcgcgtgggatggcgttgcttgtttgcggagcggtcctgttggggatcggcgaactttacggctcgccgtcattcctcaccttcatcctaccgatgtgggttgtcgcggtcggtattgtcttcacggtgtccgttaccgcgaacggcgctttggcagagttcgacgacatcgcgggatcagcggtcgcgttctacttctgcatccaaagcctgatagtcagtatcgtcgggacattggcggtgacgctgttaaacggcgatacagcgtggcccgtgatttgttacgccacggcaatggcagtgctggtgtcgttggggctggcgctccttcgatcccgtgatgctgccaccgagaagtcgccagtcgtctag

SEQ ID NO: 2166 - DNA, 18 bp, Artificial Sequence
  Synthetic DNA Sequence
gacaaaccattcctgctg

SEQ ID NO: 2167 - DNA, 18 bp, Artificial Sequence
  Synthetic DNA Sequence
cagcagctgggcggcggt

SEQ ID NO: 2168 - DNA, 23 bp, Artificial Sequence
  Synthetic DNA Sequence
catcaaagttggtgaagaagttg

SEQ ID NO: 2169 - DNA, 18 bp, Artificial Sequence
  Synthetic DNA Sequence
cccgtttgcgaaaggtgg

SEQ ID NO: 2170 - DNA, 19 bp, Artificial Sequence
  Synthetic DNA Sequence
acgtgacgttgacaaacca

SEQ ID NO: 2171 - DNA, 20 bp, Artificial Sequence
  Synthetic DNA Sequence
tcgttggattaactgaagaa

SEQ ID NO: 2172 - DNA, 20 bp, Artificial Sequence
  Synthetic DNA Sequence
gtgttgaaatgttccgtaaa

SEQ ID NO: 2173 - DNA, 24 bp, Artificial Sequence
  Synthetic DNA Sequence
aagaaaaaatcttcgaactggcta

SEQ ID NO: 2174 - DNA, 15 bp, Artificial Sequence
  Synthetic DNA Sequence
tctacacggccggtg

SEQ ID NO: 2175 - DNA, 16 bp, Artificial Sequence
  Synthetic DNA Sequence
ccgccataccccgttt

SEQ ID NO: 2176 - DNA, 24 bp, Artificial Sequence
  Synthetic DNA Sequence
cggcattaccatttccacaccttt

SEQ ID NO: 2177 - DNA, 49 bp, Artificial Sequence
  Synthetic DNA Sequence
ggcacggacaaaccattcctgctgcctatcgaagacgtgttcccgtgcc

SEQ ID NO: 2178 - DNA, 38 bp, Artificial Sequence
  Synthetic DNA Sequence
ggcacgacaaaccattcctgctgcctatcgaacgtgcc

SEQ ID NO: 2179 - DNA, 39 bp, Artificial Sequence
  Synthetic DNA Sequence
ggcagctctacttccgtaccactgacgtaaccggctgcc

SEQ ID NO: 2180 - DNA, 15 bp, Artificial Sequence
  Synthetic DNA Sequence
ttcgccggcgtgggc

SEQ ID NO: 2181 - DNA, 15 bp, Artificial Sequence
  Synthetic DNA Sequence
agcgccacgcgcagg

SEQ ID NO: 2182 - DNA, 42 bp, Artificial Sequence
  Synthetic DNA Sequence
gcgcgccaacgacttctaccacgaaatggaagagtcgcgcgc

SEQ ID NO: 2183 - DNA, 817 bp, Alcaligenes faecalis subsp. faecalis ATCC 8750; identical to SEQ ID NO: 1572

SEQ ID NO: 2184 - DNA, 1652 bp, Campylobacter coli ATCC 43479
tacaattgaagttgaaagatctatgcgtgttcttgatggtgctgttgcggtattttgttcagtgggtggggtgcagcctcaaagtgaaacagtttggagacaagcaaataaatatggtgttccaagaatagtatttgtaaataaaatggatagaatcggtgcaaatttctacaatgtagaagatcaaattcgcaaccgtttaaaagctaatccagttccacttcaaattccaatcggtgctgaggataattttaaaggcgtaatcgatcttgtaactatgaaagctttagtttgggaagatgatactaagccaacggattatgtagaaaaagaaattccagctgaacttaaagaaaaggcagaagaatatcgcacaaaaatgatagaagcagtttctgaaacttcagatgagttgatggaaaaatatttaggtggagaagaattaagccttgaagagattaaaacagggattaaagcaggatgtttaagtctttctatcgttcctatgctttgcggtacagcgtttaaaaataaaggggttcaacctttgcttgatgctgttgtggcttatttaccagctcctgatgaagttgctaatatcaaaggggaatatgaagacggcacagaagtttctgtaaaatcaactgatgatggcgaatttgcaggacttgcatttaaaattatgacagatccatttgtaggacaacttactttcgtgcgtgtttatcgtggatgtttagaaagcggttcttatgcttataactcaaccaaagataaaaaagaaagaattggtcgtttgttaaaaatgcactctaataaaagagaagaaattaaagttctttacgcaggagaaatcggtgcagttgtaggacttaaagatactttaacaggggatactcttgcaagtgaaaaagataaagtaattcttgaaagaatggatttcccagacccagttatttctgttgcagtagamccaaaaactaaagcagatcaagaaaaaatgtctattgcactaaataaattagctcaagaagatccaagctttagagtttctacggatgaagaaagtggtcaaactatcatttcaggtatgggtgaattacaccttgaaattattgttgatcgtatgcttcgtgaatttaaagtggaagctgaagtgggacaacctcaagttgcttatcgtgaaactatcagaaaaactgttgagcaagaatacaaatacgctaagcaatcaggcggtcgtggtcagtatggacatgtattcttacgccttgagccacttgagccaggaagtggatacgagtttgttaacgacatcaaaggtggggtaattccaaaagaatatattcctgcagtagataagggtgttcaagaagcattgcaaaatggtgttttagcaggttatccagtagaagatgttaaagtaactgtttatgatggaagttatcacgaggtggattcatctgagatggcatttaaacttgctgcttctatgggatttaaagagggtgctagaaaagcaggtgctgtgatcttagagcctatgatgaaagttgaagtagaaactcctgaagattacatgggcgatgttattggcgatcttaataagcgtcgtggtcaagtaaatagcatggatgaaagaggtggtaata

SEQ ID NO: 2185 - DNA, 820 bp, Succinivibrio dextrinosolvens ATCC 19716; identical to SEQ ID NO: 1574

SEQ ID NO: 2186 - DNA, 44 bp, Artificial Sequence
  Synthetic DNA Sequence
acgcgctcaaagcagaagtatacgtattatcaaaagacgcgcgt

SEQ ID NO: 2187 - DNA, 1612 bp, Campylobacter jejuni subsp. jejuni ATCC 33292
cagtgggtggggtgcagcctcaaagtgaaacagtttggagacaagcaaataaatatggtgttccaagaatagtatttgtaaacaaaatggatagaatcggtgcaaatttctacaatgtagaagatcaaattcgcaaccgtttaaaagctaatccagttccacttcaaattccaatcggtgctgaggataattttaaaggcgtaatcgatcttgtaactatgaaagctttagtttgggaagatgatactaagccaacggattatgtagaaaaagaaattccagctgaacttaaagaaaaggcagaagaatatcgcacaaaaatgatagaagcagtttctgaaacttcagatgagttgatggaaaaatatttaggcggagaagaattaagccttgaagagattaaaacagggattaaagcaggatgtttaagtctttctatcgttcctatgctttgcggtacagcgtttaaaaataaaggggttcaacctttacttgatgctgttgtggcttatttaccagctcctgatgaagtggcaaatatcaagggtgaatatgaagatggcacagaagtttctgtaaaatcaactgatgatggcgagtttgcaggacttgcatttaaaattatgacagatccatttgtaggacaacttactttcgtgcgtgtttatcgcggttgtttagaaagtggttcttatgcttataactcaactaaagataaaaaagaaagaattggtcgtttgttaaaaatgcactctaaccaaagagaagagattaaagtgctttacgcaggcgaaattggtgctgttgtaggacttaaagatactttaacaggggatactcttgtaagtgaaaaagataaggtaatccttgaaagaatggattttccagatccagttatttctgttgcagttgagccaaaaactaaagcagatcaagaaaaaatgtctattgctttaaataaattagcacaagaagatccaagttttagagtttctacagatgaagaaagtggccaaactatcatttcaggtatgggtgagttacaccttgaaattatcgttgatagaatgcttcgtgaatttaaagttgaagctgaagtaggtcaaccacaagttgcttatcgcgaaactattagaaaaactgttgaacaagaatacaaatacgctaaacaatcaggtggtcgtggtcagtatggacatgtattcttacgccttgaaccacttgagccaggtagtggatatgaatttgttaatgatatcaaaggtggagtaattccaaaagaatacattcctgcagttgataaaggtgttcaagaagcattacaaaatggtgttttagcaggttatcctgtggaagatgttaaagtaactgtttatgatggaagttatcacgaggtggattcatctgagatggcgtttaaacttgctgcttctatgggctttaaagaaggtgctagaaaagcaggtgctgtgatcttagagcctatgatgaaagttgaagtagaaactcctgaagattacatgggtgatgttattggagatcttaacaaacgccgtggtcaagtaaatagcatggatgagcgtggtggaaataaaatcatcacagcattttg

SEQ ID NO: 2188 - DNA, 1667 bp, Campylobacter jejuni subsp. jejuni ATCC 33560
acaattgaagttgaaagatctatgcgtgttcttgatggtgctgttgcggtattttgttcagtgggtggggtgcagcctcaaagtgaaacagtttggagacaagcaaataaatatggtgttccaagaatagtatttgtaaataaaatggatagaatcggtgcaaatttctacaatgtagaagatcaaattcgcaaccgtttaaaagctaatccagttccacttcaaattccaattggtgctgaggataattttaaaggcgtaatcgatcttgtaactatgaaagctttagtttgggaagatgatactaagccaacggattatgtagaaaaagaaattccagctgaacttaaagaaaaggcagaagaatatcgcacaaaaatgatagaagcagtttctgaaacttcagatgagttgatggaaaaatatttaggcggagaagaattaagccttgaagagattaaaacagggattaaagcaggatgtttaagtctttctatcgttcctatgctttgcggtacagcgtttaaaaataaaggggttcaacctttgcttgatgctgttgtggcttatttaccagctcctgatgaagtggcaaatatcaagggtgaatatgaagatggcacagaagtttctgtaaaatcaactgatgatggcgagtttgcaggacttgcatttaaaatcatgacagatccatttgtaggacaacttactttcgtgcgtgtttatcgcggttgtttagaaagcggttcttatgcgtataactcaactaaagataaaaaagaaagaattggtcgtttgttaaaaatgcactctaacaaaagagaagagattaaagtgctttacgcaggcgaaattggtgctgttgtaggacttaaagatactttaacaggggatactcttgcaagtgaaaaagataaggtaatccttgaaagaatggattttccagatccagttatttctgttgcagttgagccaaaaactaaagctgatcaagaaaaaatgtctattgctttaaataaattagcacaagaagatccaagttttagagtttctacagatgaagaaagtggtcaaactatcatttcaggtatgggtgagttacaccttgaaattatcgttgatagaatgcttcgtgaatttaaagttgaagctgaagtaggtcaaccacaagttgcttatcgcgaaactattagaaaaactgttgaacaagaatacaaatacgctaaacaatcaggtggtcgtggtcagtatggacatgtattcttacgccttgaaccacttgagccaggtagtggatatgaatttgttaatgatatcaaaggtggggtaattccaaaagaatacattcctgcagttgataaaggtgttcaagaagcattacaaaatggtgttttagcaggttatcctgtggaagatgttaaagtaactgtttatgatggaagttatcacgaggtggattcatctgagatggcgtttaaacttgctgcttctatgggctttaaagaaggtgctagaaaagcaggcgctgtgatcttagagcctatgatgaaagttgaagtagaaactcctgaagattatatgggtgatgttattggagatcttaacaaacgccgtggtcaagtaaatagcatggatgagcgtggtggaaataaaatcatcacagcatt

SEQ ID NO: 2189 - DNA, 1255 bp, Leishmania guyanensis ATCC 50126; identical to SEQ ID NO: 859

SEQ ID NO: 2190 - DNA, 1248 bp, Trypanosoma brucei subsp. brucei strain EATRO795
gcccttgacgttgttgacaaacttggccgtgatgagcctcttactcttgagatcgtgcagcatcttgacgcccacacgggccgctgtatcgcgatgcaaacgacggatctcctcaaactgaaggcaaaggtcgtttcgacaggtggcaacatttccgttcctgtcggccgggaaacactaggtcgtatcttcaacgtgcttggagacgctattgaccagcgcggccccgttggtgagaaactgcgcatgcccatccatgccgtggctcccaagcttgcggaccaggccgctgaggatgcggtgctcacaactggtattaaggtgattgatctcattctcccttactgcaaaggtggaaaaattggcctctttgggggtgcgggtgtgggcaaaaccgtcattattatggagctcattaacaacgttgccaagggtcacggtggtttctctgtcttcgctggtgttggtgagcgtacccgtgagggaacggatttgtatcttgagatgatgcagtctaaggttattgaccttaagggtgagtccaaatgtgtgttggtgtacggtcagatgaacgagcccccaggtgcccgtgcgcgtgttgcgcagtcggctctgacgatggctgagtacttccgtgatgtggagggccaagatgtgcttctttttatcgacaatatttttcgtttcactcaggctaactccgaggtgtcggcgcttctgggtcgtattcccgccgctgttggctaccagcctaccctcgctgaggatctagggcagttgcaggagcgtattacctcaacaacgaaaggctccattacttctgtgcaggccgtatacgtgccggccgatgacattaccgatccagctccagcaacaaccttctcacatctggacgccacaactgtgttggaccgtgctgttgccgagtctggtatctaccccgctgttaacccactggaatgcgcctcgcgtatcatggaccccgacgttatcagtgtggatcactacaatgttgcacaagatgtggtacagatgctcaccaagtacagggaattacaggatatcattgctgtccttggtatcgacgagctaagcgaggaggacaaacttatcgtggaccgtgcgcgtaagttggtgaagttcctctcccagccattccaagttgctgaggtcttcacaggaatgactggccattacgtgcagttggatgacaccatcgattccttttctggtctcctcatgggtacg

SEQ ID NO: 2191 - DNA, 440 bp, Aspergillus nidulans strain WSA-176
gagctgattgtaagtcatcgaccacttgatatatgaatacatctaacagtagtagaacaacatcgccaaggctcacggtggttactccgtcttcactggtgtcggtgagcgtactcgtgagggtaacgatctgtaccacgaaatgcaggagactggtgtcattcagctcgacggcgaatccaaggtgtctcttgtgttcggtcagatgaacgagcccccaggtgctcgtgcccgtgtcgcccttactggtctgaccatcgccgaatacttccgtgacgaggagggtcaggacgtgctgctcttcattgacaacattttccgtttcacccaggccggttccgaggtgtctgcccttcttggtcgtatcccctctgccgtcggttaccagcccactctggccgtcgacatgggtggtatgcaggaacgtattaccaccacca

SEQ ID NO: 2192 - DNA, 1262 bp, Leishmania panamensis ATCC 50158
gctgacggcgctggacgtgacggaggacctcggccgcgatgagccgctgacgctggagatcgtgcagcacttggatgcgaacaccggccgctgcattgcgatgcagacgacggacctgctgaagctgaagtcgaaggttgtgtcgaccggcggcaacatctccgtgccggtgggccgcgagacgctgggccgcatcttcaacgtgctgggcgacgcgattgaccaccgcggccccgtgtgcgagaagatgcgcatggcgatccacgccgaggcgccgaagctggcggaccaggctgcggaggacacgatcctgacgaccggcatcaaggtgatcgacctgattctgccctactgcaagggcggcaagatcggcctgttcggcggtgccggtgtgggcaagactgtgatcatcatggagctgatcaacaacgtcgcgaaggggcacggcggcttctccgtgttcgccggcgttggcgagcgcacgcgcgagggcacggacctgtacctggagatgatgcagtcaaaggtgattgacctgaagggcgagtcgaagtgcgtgcttgtgtacgggcagatgaacgagcccccgggtgcgcgcgcgcgcgttgcgcagtctgcgctgacgatggccgagtacttccgcgacgtggagggccagaacgtgctgctgttcatcgacaacatcttccgcttcacgcaggcgaactccgaggtgtctgcgctgctgggccgcatcccggccgccgtgggttaccagccgacgcttgcggaggatcttggcatgctgcaggagcgcattacgtcgacgacgaagggatcgattacgtctgtgcaggctgtgtacgtgcctgcggatgatatcacggaccccgcgcccgcgacgacgttctcgcacctggacgcgacgactgtgctggaccgcgcggtggcggagtcgggcatctaccctgccgtgaacccgctggagtgcgcgtcgcgcatcatggaccccgatgtgatcgacgtggaccattacaacgttgcacaggatatcgtccagatgctgaccaagtacaaggagctgcaggacatcattgcggtgcttggcatcgacgagctgagcgaggaggacaaggtcgtggtggaccgcgcgcgcaaggtgacgcggttcctgtcgcagccgttccaggttgcggaggtgttcaccggcatgacgggccactacgtgcagctgagcgacacggtggagtcgttctctggcctgctgatggggtcgtacgacc

SEQ ID NO: 2193 - DNA, 912 bp, Aspergillus nidulans strain WSA-176
ttccgatggtcaaatgtacgattgatattccttccagccagtcaggataacagctgataccagttgcaaataggccccagactcgtgagcacttgttgcttgcccgtcaggttggtgtccagaagatcgttgtcttcgtcaacaaggttgacgctgtcgatgaccctgagatgttggagcttgttgagctcgagatgcgtgagctcctcaacacttacggtttcgagggagaggagacccctatcatcttcggttccgccctgtgcgctctcgaaggccgccgcgaggacattggtactcagcgtattgactccctcctcgaggccgttgacacttggatccctaccccccagcgtgacttggacaagcccttcctgatgtccattgaggaagttttctccattggtggtcgtggtaccgtcgcctctggtcgtgtcgagcgtggtctcctcaagaaggataccgaagttgaaattcacggtgctgatggtattctgaagaccaaggtcaccgacattgagaccttcaagaagagctgcgatgagtctcgtgctggtgacaactccggtcttctcctccgtggtatccgtcgtgaggatgttcgtcgtggtatggtcatcgctgcccctggctccatcaaggcctccaagaagttcatggtctccatgtacgtcttgactgaggctgaaggtggccgcaagaacggcttcggtgccaactaccgcccccaggctttcatccgcactgctggtaagtttcgaactatttgattcattgatcacgtccctaactgttactttagacgaggcttgcgaccttcatttccctgatgaggccgacaaggaccgccacgtcatgcccggtgacaacgtcgaaatggtcctcaacctcaacaaccccgttgctgctgag

SEQ ID NO: 2194 - DNA, 887 bp, Aureobasidium pullulans strain WSA-234
tcatcgtcgtcgccgcttctgacggtcagatgccccagaccagagagcacttgcttctcgcccgtcaggtcggtatccagaagattgtcgtcttcgtcaacaaggtcgacgccatcgaggacaaggagatgcttgagctcgtcgagatggagatgcgtgagctcctcagcagctacggcttcgagggtgacgagacccccatcgtcatgggttccgctctttgtgcccttgagaaccgccagcccgagattggaaccacccagatcgacaacctgatgaacgctgtcgacgagtggatccccactccccagagagatcttgagaagcccttcctcatgtccgttgaggatgtcttctctatccccggtcgtggtactgtcgtttctggccgtgttgagcgtggtaccctgaagaaggattccgaaatcgagcttgtcggcaagaacaaggtccccatcaagaccaaggtcaccgacatcgagaccttcaagaagtcttgcgacgagtcccgcgctggtgacaactccggtcttctgctccgtggtatcaagcgtgaggatgtcaaccgtggtatggttgtcgtcaagcccggtaccgtcacctcgcacaagaagttcctcgtctccatgtacgtcctgaccaaggaggagggtggtcgtcacactggtttccacggaaactaccgtccccagatcttcatccgtaccgctggtaagtcctgactttgaactgctgaccaattttcgcatctctaacatgttttacagacgaggctgccgctattgactggcccgaaggcaccgaggacgctgactccaagatggtcatgcccggtgacaacgtcgagatggtctgctctcttcacagacctcttgccgttgaacagg

SEQ ID NO: 2195 - DNA, 984 bp, Emmonsia parva ATCC 10784
tgacggccaaatgtaggactcttgcgcgggactgactgattggggggaatccattttttcttttttctttttctttttgagtacatgattatactaatatttggataacgtaccaggcctcaaacacgtgaacatttactccttgcccgacaagtcggtgtccagaagatcgtcgttttcgtaaacaaggtcgatgttctcgaagataaggagatgttggagcttgtcgagttggaaatgagagagctcttgaacacctacggattcgagggtgaggaaacgcccatcatcttcggttctgccctttgtgccatggagggccgcgagcctgagctgggcgagaagagaattgatgaattgctcgacgctgttgatagctggatccctacgccgcaacgtgatacggaaaaacccttcctaatgtccattgaggaagtgttctccatctccggtcgtggaaccgttgcctccggccgtgttgagcgtggtgtcctcaagaaggattccgaagtcgagcttgttggcggcggcgtcgccccaatcaggaccaaggtaaccgatatcgaaaccttcaagaagtcctgcgacgagtccagggctggagacaactctggccttttgttgcgtggtgtcaagcgtgaggatatccgccgtggtatggtcgttgtcgttcctggcagcgtcaaggcccacgacaagttcttggtgtccatgtatgttctgaccgaagccgagggtggtcgccgaactggattcggccaaaactatcgtcctcaaatgtttatccgcacagctggtacgtaacgtataatgcctctcctcttcatatataccaccccccccaccactgactccctgactcttcgattacagacgaggccgccgatctcagcttccctgacgcagcagacgaaaccaaactggttatgcccggtgacaacgtcgagatgatcctcaagacacaccgccccatagctgccgaag

SEQ ID NO: 2196 - DNA, 806 bp, Exserohilum rostratum strain WSA-215
gccgcctctgacggccaaatgccccagacccgtgagcacttgctgcttgctcgccaggtcggtgttcagaagattgttgtttttgtcaacaaggtcgatgccgtcgaggacaaggagatgttggagctcgttgagatggagatgcgtgagttgctcagcagctatggcttcgagggcgatgagactcccattgtcatgggctccgctctctgcgccatcgagggccgtgagcccgaaattggtgtcaaccgtattgatgagctgctcgaggctgtcgacacctggatccccacccctcagcgtgataccgacaagcccttcctcatggctgttgaggacgtcttctccattgctggccgtggtaccgtcgtttctggccgtgtcgagcgaggtgtcttgaagcgcgatgccgaagtcgagctggttggcaagggcactgcgcccatcaagaccaaggttaccgacattgaaaccttcaagaagtcgtgtgaagagtctcgcgccggtgacaactcgggtctcctcctccgtggtgtcaagcgtgacgacgtccgccgtggcatggtcgtttctgttcctggacaagtcaaggcccacaagaagttcctcgtctccatgtatgtgttgagcaaagaggaaggtggccgccacacgggcttcggcgagaactacaggccacaaatgttcatccgtactgctgacgagtcatgcgcgctgcactggccagaaggtaccccagatgctcacgacaagcttgttatgcctggtgataacgttgagatggtttgtgagcttcacgtgccaca

SEQ ID NO: 2197 - DNA, 799 bp, Fusarium moniliforme strain WSA-213
acccgtgaacacttgctcctcgctcgtcaggttggtgttcagcgaattgtcgtctttgtcaacaaggtcgatgccattgatgaccccgagatgcttgagctcgtcgagatggagatgcgcgagcttcttaacacctatggcttcgaaggcgacgacactcccgtcatcatgggctcggctctcatgtctctccagaaccagcgccctgagattggcaccgagaagattgatgagcttcttgctgccgtcgacgagtggatcccaacccccgagcgtgaccttgacaagcccttccttatgtccgtcgaggatgtcttctccattgctggccgtggtaccgtcgtgtctggccgtgtggagcgtggtgttctgaagcgtgaccaggagatcgagcttgttggaaagggtcaggaggttatcaagaccaaggttaccgacatcgagaccttcaagaagtcttgtgagcagtcccaggctggtgacaactctggtctcctcatccgaggtgttcgccgtgaggatgtccgccgtggtatggtcgtctgcgctcctggcaccgtgaagtctcacacccagttcctcgcttccctctatgtcctctccaaggaggagggtggccgacacaccggtttccaggagcactaccgaccccagctctacctccgaaccgcagatgagtccattgacctgactttccctgagggtactgaggatgcctccagcaagatggtcatgcctggcgacaacaccgagatggttgtcaccatgggtcaccccaatgccatcgaggttggtcagc

SEQ ID NO: 2198 - DNA, 819 bp, Fusarium solani ATCC 32793
ctctgacggtcagatgccccagacccgtgagcacttgctgcttgcccgtcaggtcggtgtccagaagattgtcgtcttcgtcaacaaggtcgatgccattgacgaccctgagatgcttgagctcgtcgagatggagatgcgtgagctcctcaacacctacggcttcgagggtgacgagacccctgtcatcatgggctctgctctcatgtccctccagaaccagcgccccgagatcggtagccagaagattgacgagctccttgccgccgttgacgagtggatccctacccccgagcgtgaccttgacaagcccttcctcatgtccgttgaggatgtcttctccattgccggccgtggtaccgtcgtctctggccgtgtcgagcgtggtgtcctgaagcgcgaccaggagattgagctcgtcggcaagggtaacgaggtcatcaagaccaaggtcaccgacattgagaccttcaagaagtcttgcgagcagtcccaggctggtgacaactctggtctcctcatccgaggtgtccgccgtgaggatgtccgccgtggtatggtcgtctgcgcccccggcactgtcaagtcccacactcagttcctttcttccctctacgtcctcaccaaggaggagggtggccgacacactggcttccaggagcactaccgaccccagctctacctccgaactgctgatgagtccatcgacctgaccttccccgagggtaccgaggacgccagcagcaagatggtcatgcccggtgacaacaccgagatggtcatcaccatgggccaccccaacgccattgaggtcggtca

SEQ ID NO: 2199 - DNA, 1025 bp, Histoplasma capsulatum strain WSA-377
tgctgacggccaaatgtaagacgccgcgagggagtgctgaaggttttatgctttttaggccctttgtttctgagagcatgatgatactaatactcggaaacgtatctattaggcctcaaacacgtgagcatttgctccttgcccgacaggtcggtgtccaaaagatcgtcgttttcgtgaacaaagtcgacgcccttgaggacaaggagatgttggagcttgtcgagttagaaatgagagagctcttaaacacctacggatttgagggtgaagagacacccatcatctttggttctgccctttgcgccatggaaggccgtgagcctgagttgggagaaaagaaaattgatgaattgctggaggctgttgatacttggatcccaacaccacaacgtgataccgaaaaacctttcttgatgtccgttgaggaagtattctctatctccggtcgtggaaccgttgcctccggtcgtgttgagcgcggtgtcctcaagaaggattcagaagtcgagctaattgggggcggctccacccccatcaggacgaaggtaactgatatcgaaactttcaagaaatcctgtgacgagtctagagctggggacaactccggtcttttattgcgtggtatcaagcgtgaagatatccgccgtggtatggtagttgccgttcctggcagcgtcaaggcccacgacaagttcttggtgtcgatgtatgtcctgaccgaagctgagggtggtcgccgaaccggattcggccagaactatcgtcctcaaatgttcatccgcacagctggtatgtcaaaatggggccccttttcataatcctttctttttttccttttcctctctctatctctctctctgtttcttttcaactcgcctgattcacgaaattaactaacccctttgattatagacgaagccgcccatctcagcttccctagtggagcagatgaaagcaaactcgttatgcctggtgacaacgtcgagatgatcctccagacacaccgccccgtggctgctgag

SEQ ID NO: 2200 - DNA, 667 bp, Kocuria kristinae ATCC 27570
agcacgtgctgctcgcccgccaggtcggcgtgccgaccctgctggtcgccctgaacaaggccgacatggtcgaggacgaggagctgctggacctcgtcgagatggaggtccgcgagctgctgtcctcccaggagttcgacggcgacaacgcccccgtcatccgcgtctccgcgctgaaggcgctggagggcgacgagaagtgggtcaagtccatcgaggagctcatggaggccgtggacgagtacatcccggaccccgtgcgcgacaaggacaagccgttcctgatgcccatcgaggacgtcttcaccatcaccgggcgcggcaccgtggtgaccggtcgcgccgagcgcgggaccctggccctgaactccgaggtcgagatcgtcggcatccgcccgatccagaagaccacggtcaccgggatcgagatgttccacaagcagctcgacgaggcctgggccggcgagaactgcggtctgctgctgcgcggcctgaagcgcgacgacgtcgagcgcggccaggtcgtggtgaagccgggttccatcaccccgcacaccaacttcgaggcgaacgtctacatcctgtccaaggacgagggtgggcgtcacaacccgttctactcgaactaccgtccgcagttctacttccggaccaccgacgtcaccgg

SEQ ID NO: 2201 - DNA, 778 bp, Vibrio mimicus ATCC 33653
tgctgcaacagatggtccaatgccacaaactcgtgagcacatcctgctgggtcgccaagtaggtattccttacatcatcgtattcatgaacaaatgtgacatggttgacgatgaagagcttctagagctggttgagatggaagttcgtgagcttctgtctgagtacgatttcccaggtgatgacctgccagtaatccaaggttcagcactaggcgcgctaaacggcgaagcacagtgggaagcgaagattgttgaactagcagaagcactagattcatacattccagagccagagcgtgcagtagacatggcattcctgatgccaatcgaagacgtattctcaatccaaggtcgtggtacagtagtaactggccgtatcgagcgcggcatcctgaaagtgggtgacgaagttgcgatcgttggtatcaaagacacagtaaaaactacctgtacaggtgtagaaatgttccgtaagctgcttgacgaaggtcgtgcaggtgagaacgttggtgcactgctacgtggtactaagcgtgaagaagtagagcgtggtcaagtactggcgaagccaggttcaatcaccccacacactaagttcgaatcagaagtatacgtactgtcaaaagacgaaggtggccgtcatactccattcttcaaaggttaccgtccacagttctacttccgtacaactgacgtaacaggcagcatcgagcttccagaaggcgtagaaatggtaatgccaggcgacaacatcaagatggttgtagacctgattgca

SEQ ID NO: 2202 - DNA, 412 bp, Citrobacter freundii ATCC 8090
aacgctgaccctgcaggttattgccgctgcgcagcgtgaaggtaaaacctgtgcatttatcgatgcagaacacgcactggacccggtctatgcccgtaagcttggcgttgatatcgataacctgctgtgttctcagccggataccggtgaacaagcgctggaaatctgtgatgcactggcgcgctccggtgcggttgacgttatcgttgtcgactccgttgccgcattgacgccgaaggcagaaatcgaaggcgagattggcgactctcacatgggccttgcggcgcgtatgatgagccaggcgatgcgtaagctggccggtaacctgaagcagtccaacacgctgctgattttcatcaaccagatccgtatgaagattggcgttatgttcggtaacccggaaaccaccacc

SEQ ID NO: 2203 - DNA, 337 bp, Clostridium botulinum strain 20:1.2
tttagatccatcttatgctagaaatttaggtgttgatatagataacctaatagtttctcaaccagatacaggagaacaggctttagagataacagaagctttagtaagatcaggagcagtagatgttatagttgtagactctgtagcagctttagttcctagggcagaaatagaaggagaaatgggagactcacatgtaggtcttcaagcaagacttatgtctcaagccctaagaaaattagcaggatctataaataaatctaagtgtgtagctatatttataaaccaattaagagaaaaggttggtataatgtttggaaatccagaaacaactcct

SEQ ID NO: 2204 - DNA, 379 bp, Francisella tularensis ATCC 29684
aaagcaaggcggtactgcagcatttgttgatgctgagcatgcactagatccaaaatatgcaaagcttttaggtgttgatgttgataatctgatcgtgtcacagccggatacgggtgagcaagctttagagattgctgatatgttggtacgttctggaggagttgatattgtagtaattgactctgttgctgcacttacgccaaaggcagagattgagggtgacatgggcgactcgcacatgggcttacaagcaagattaatgtcacaagcactaagaaaactaacggcaaatatcaagcgctcaaatactctagtgatattcattaaccaaattcgtatgaagatcggggttatgtttggtaaccctgaaactacaact

SEQ ID NO: 2205 - DNA, 337 bp, Peptostreptococcus anaerobius ATCC 27337
acttgacccagtatatgcaagggctcttggagtggatatagacaacctagtcatatctcagccagatacaggagaacaggccctagatatagcagagtcccttataagatcaggagctgtagatatactagtaatagactcagtagctgccctagtacctaaggcagaaatagaaggtgacatgggagattctcacgtaggtctacaggctagacttatgtcacaggcacttagaaaattgactggatctataaagaagtcaaactgtgttgttatatttatcaaccagttgagagaaaaagtaggggttatgttcggtaatccagagacaacaaca

SEQ ID NO: 2206 - DNA, 337 bp, Peptostreptococcus asaccharolyticus strain LSPQ 2639
tcttgatgctggatatgcaaaaaaccttggagtagatgtagaaaatttaattatttctcaacctgatacaggtgagcaagccttagaaataactgaagctcttgtaagatctaacgctgttgatttaattattatagactcagttgccgcacttgtaccaaaagcagaaatcgatggtgacatgggagctgcacaaataggtcttcaagcaagacttatgtctcaagctcttagaaaattaactggggcaatcaacaagtcaaaatgtaccgttgtatttattaaccaacttagagaaaaagttggtatcatgtttggtaacccagaaactacaaca

SEQ ID NO: 2207 - DNA, 408 bp, Providencia stuartii ATCC 33672
ctcacgttgcaagttattgcagcagcacaacgtagcggaaaaacctgtgcatttatcgacgctgaacatgcgctagatccaatctatgcgaaaaaactgggtgttgatatcgataaccttctatgttctcaacctgatactggtgagcaagcattagagatttgtgatgcactgacgcgttcaggcgctgttgatgtcattatcgttgactccgtggccgcattaacaccaaaagctgaaattgaaggtgaaatcggtgactcacacatgggcttagcggctcgtatgatgagccaagcgatgcgtaaattagcgggtaacttaaagaactcgaatacacttttaatcttcattaaccaaatccgtatgaagattggcgttatgtttggtaacccagaaaccactaca

SEQ ID NO: 2208 - DNA, 403 bp, Salmonella choleraesuis subsp. choleraesuis ATCC 9150
gctgcaggtgattgccgctgcgcagcgtgaaggtaaaacctgtgcgtttatcgatgcggaacacgcgcttgaccctgtttacgcacgcaagctgggcgtcgatatcgataacctgctttgttctcagccggataccggcgagcaggcgctggaaatctgtgacgcgctggcgcgttcaggcgcggtggacgtcattgtggtcgactccgtagcggcgctaacgccgaaagcggaaatcgaaggcgaaattggcgactctcacatgggcctcgcggcgcgtatgatgagccaggcgatgcgtaagctggcggggaacctaaaacagtccaacacgctgttgattttcatcaaccagatccgtatgaagattggcgtgatgttcggtaacccggaaaccaccacc

SEQ ID NO: 2209 - DNA, 412 bp, Salmonella choleraesuis subsp. choleraesuis ATCC 14028
gaccctgacgctgcaggtgattgccgctgcgcagcgtgaaggtaaaacctgtgcgtttatcgatgcggaacacgcgcttgaccctgtttacgcacgcaagctgggcgtcgatatcgataacctgctctgctctcagccggataccggcgagcaggcgctggaaatctgtgacgcgctggcgcgttcaggcgcggtggacgtcattgtggtcgactccgtagcggcgctaacgccgaaagcggaaatcgaaggcgaaatcggcgactctcacatgggcctcgcggcgcgtatgatgagccaggcgatgcgtaagctggcggggaacctgaaacagtccaacacgctgttgattttcatcaaccagatccgtatgaagattggcgtgatgttcggtaacccggaaaccaccacc

SEQ ID NO: 2210 - DNA, 337 bp, Staphylococcus saprophyticus ATCC 15305
attagatcctgtttacgcagaagctttaggcgtagatatacaaaatttatatttatctcaacctgatcatggggaacaaggtttagaaattgccgaagcatttgttagaagtggcgctgttgatatcgttgtggtcgattcagttgctgcgcttacacctaaagctgaaattgaaggtgaaatgggagatacgcacgttggtttgcaagcacgtcttatgtcccaagccttgagaaagctttccggtgcaatttcaaaatcaaatacaacagcagtatttatcaaccaaatccgtgaaaaagttggtgtgatgttcggtaatcctgaagttacacca

SEQ ID NO: 2211 - DNA, 412 bp, Yersinia pseudotuberculosis ATCC 29833
gacactgacattacaggttatcgccgccgcacagcgtgaaggcaaaacgtgtgcatttatcgatgccgaacatgcccttgacccaatctatgccaagaaattgggtgtagatattgataacctactgtgttctcagccagatactggcgagcaggcactggaaatttgtgatgcgctgactcgctctggtgcggttgacgttatcatcgttgactccgtagcggcattgacaccaaaagctgaaattgaaggtgaaattggcgattctcatatgggccttgccgcgcgtatgatgagccaggctatgcgtaagctggcgggtaacctgaagaatgcgaataccttactgatttttatcaaccaaatccgcatgaaaattggcgtgatgtttggtaacccagaaaccactacc

SEQ ID NO: 2212 - DNA, 404 bp, Zoogloae ramigera ATCC 25935
cacgctcaccttgcaaaccatcgcggaaatgcaaaaactgggcggcacctgcgcgtttatcgacgccgagcacgcactggacgtcacgtacgcgcaaaagctgggcgtcaacctgagcgatctgctgatctcgcaaccggacaccggcgaacaagcgctggaaatctgcgacgccctggtgcgttccggttcggtggacatggtcgtgatcgactcggtcgccgcgctgaccccgcgcgccgagatcgaaggcgacatgggcgattcgctgccaggtttgcaggcacgtttgatgtcgcaagcactgcgcaagcttaccggttcgatcaaccgcaccaacaccctggtcatcttcatcaaccagatccgcatgaaaatcggcgtcatgttcggcagcccggaaa

SEQ ID NO: 2213 - DNA, 42 bp, Artificial Sequence
  Synthetic DNA Sequence
cgtgccattgacatgatttccgaagaagacgctgaaggcacg

SEQ ID NO: 2214 - DNA, 125 bp, Abiotrophia adiacens ATCC 49175
caactacattacgttctgcaacacaaggtcgtggtactttcagtatgacatttgaccactatgaagatgttcctaagagcattgcagaagaaatcatcaagaaaaatggcggtaacggagaataa

SEQ ID NO: 2215 - DNA, 140 bp, Acinetobacter baumannii ATCC 19606
cgactcaaatgcgttctatgtctcaaggtcgtgcgacatactcaatggaatttgctaaatatgctgaaactccacgtaacgtggctgaaggcatcatcgctaaattccaagctggcggtaaaaaaggtgacgacgagtaa

SEQ ID NO: 2216 - DNA, 119 bp, Actinomyces meyeri ATCC 35568
ccggtgacctgcgttctaagacgcagggtcgcgctgtctactccatggagttcgacagctacgccgaggttccgcgcgcggtcgcggatgagatcgtcggcaagtctcggggcaactga

SEQ ID NO: 2217 - DNA, 113 bp, Clostridium difficile ATCC 9689
cgaccgacgttcgctccatgtcccagggtcgcgcaagctactctatggaattcaaaaaatacaacacagctccggcgcacatcgctgaaactgtatccaaaaaacaaggctga

SEQ ID NO: 2218 - DNA, 119 bp, Corynebacterium diphtheriae ATCC 27010
gcgacctgcgttcccgtacccagggccgtgcaaactacaccatgatcttcgactcctacgctgaggttcctaccaacgtggcagctgagatcgtggcagagcgcaacggcactgcctaa

SEQ ID NO: 2219 - DNA, 115 bp, Enterobacter cloacae ATCC 13047
aactcagctgcgttctctgaccaaaggtcgtgcatcatacaccatggaattcctgaagtatgatgatgcgcctaacaacgttgctcaggccgttattgaagcccgtggtaagtaa

SEQ ID NO: 2220 - DNA, 115 bp, Klebsiella pneumoniae subsp. pneumoniae ATCC 13883
aactcagctgcgttctctgaccaaaggtcgtgcatcatacaccatggaattcctgaagtatgatgatgcgccgaacaacgttgctcaggccgttattgaagcccgtggtaaataa

SEQ ID NO: 2221 - DNA, 113 bp, Listeria monocytogenes ATCC 15313
caactcaccttcgttcaggtacgcaaggtcgtggtgtatacactatgcaatttgaccactatgaagaagttcctaaatctattgctgaagaaatcattaaagctaatggtgga

SEQ ID NO: 2222 - DNA, 118 bp, Mycobacterium avium ATCC 25291
cggcgacctgcggtccaagacccaaggccgggcgaactactccatggtcttcgactcctacgccgaagtgccggccaacgtgtcgaaggagatcatcgcgaaggcgacgggtcagtga

SEQ ID NO: 2223 - DNA, 119 bp, Mycobacterium gordonae strain M-Gor-1
ccggcgacctgcggtccaagacgcaaggccgggcgaactactccatggtgttcgactcgtacgccgaagttccggcgaacgtgtcgaaggagatcatcgcgaaggcgacgggcgaatag

SEQ ID NO: 2224 - DNA, 118 bp, Mycobacterium kansasii strain Mkan-1
cggcgacctgcggtccaagactcaaggccgggcgaactactcgatggtgttcgattcctacgccgaagtgccggctcaggtgtcgaaggagatcatcgcgaaggcgactggcgagtga

SEQ ID NO: 2225 - DNA, 118 bp, Mycobacterium terrae strain Mter-1
cggagacttgcggtcgaagacccagggccgggcgaactactccatggtgttcgactcctacgccgaagtgccggcgcaggtggcgaaggagattatcgcgaaggcaacgggcgagtaa

SEQ ID NO: 2226 - DNA, 115 bp, Neisseria polysaccharea ATCC 43768
gaccgacctgcgttctgcaacccaaggccgcgctacttactctatggagttcaagaaatattctgaagctcctgcccacatagctgctgctgtaactgaagcccgtaaaggctaa

SEQ ID NO: 2227 - DNA, 118 bp, Staphylococcus epidermidis ATCC 14990
aacttcattacgttctaacacgcaaggtcgcggtacttacacaatgtactttgaccactatgcagaagttcctaaatcaattgctgaagaaatcatcaagaaaaataaaggtgaataa

SEQ ID NO: 2228 - DNA, 118 bp, Staphylococcus haemolyticus ATCC 29970
aacttcattacgttctaacactcaaggtcgcggtacttacactatgtacttcgatcactatgcagaagttccaaaatcaattgctgatgatatcatcaaaaaaaataaaggtgaataa

SEQ ID NO: 2229 - DNA, 1630 bp, Succinivibrio dextrinosolvens ATCC 19716
cgttcaatgcgtgttctagacggtgcagttatggtttactgtgctgtgggtggtgttcagcctcagtctgaaaccgtttggagacaggctcagaagtacaaggttcctcgtattgctttcgttaataagatggaccgtactggtgctaatttcctacgtgttgtagagcagattaagacccgtctaaagggtaaccctgttcctctaatgttacctatcggtaaagaggacagctttgttggtgtagttgacctaatcaagcgtaaggctatcgactgggatgaggcatctcagggtatgaagtttgagtacgttgacattccagcagatatggttgaggaagttgaagagtggcgtgcaaagcttgtagaagcagctgcagaagctaacgacgagctgatggataaattcttcggtggtgaagagctgaccgaggaagagatcaaggctgctctacgtgagcgtactcttcgcaacgaaattattcctatgtgctgcggttcagcatttaagaacaagggtgttcaggcaatgcttgacgctgttgttgagtatcttccatctccagcagatgttcctgctgttgagggtaagaccctaaccggtgaagctgatactcgtaaggctgacgataaagagccattctctgctttagcatttaagctagcaaatgacccattcgtaggtaacttaacattcttacgttgctactcaggctttattaagtctggtgacactgtaatgaactcagataagcagaagcgtgagcgtttcggccgtctagttcagatgcacgctaatgctcgtaatgaggttagcgaggtttatgcaggtgacatcgttgctgctattggtctgaaggaaaccgttaccggtgataccttatgtgacccagagcatccaatcattcttgagtcaatcgactttgcagagccagttatctctgtagcagttgagcctaagaccaaggacgatcaggagaagatggctcttgctttacagcgtttagcaaaagaagatccttcattccgcgttcgtacagacgaagagtctggccagaccattatttctggtatgggtgagcttcacctagacatcattgttgaccgtctacgccgtgagttcaaggttgagtgtaatcagggtaagccacaggttgcataccgtgagaccattaagagcaaggttgaacagcaaggtaagtttgctcgtcagtctggtggtcgtggtcagtacggtgactgctggttacgtatggaacctcttgagccaggtaagggctacgaattcgtgaatgagattgttggtggtgtaattcctaaggaatatatccctgcaattgataagggctgtcaggagcagatcgctaacggtgttctagctggtttcccagttgttgacatcaagatcactgtattcgatggttcttaccacgaagttgactcttcagaaatggcattcaagattgctgcttctatggcattcaaagagggcttcaagaaggcaaatcctgttcttctagagcctttaatgaaggtagaagttgatactcctgaagactacatgggtgacgttattggtgacttaaaccgtcgtcgtgctatcgttgaaggcatggaagatggtccta

SEQ ID NO: 2230 - DNA, 1662 bp, Tetragenococcus halophilus ATCC 33315
ttgaagtgcaacgttcattgcgtgtgctagacggttcagttactgtcttggactcacaatcaggtgttgaaccacaaactgaaacagtttggcgtcaagcaacagaatatcaagtacctcgtattgtattctgtaataaaatggataaggttggcgcagatttcttatattctgtccgatcattgcatgatcgtttagaagctaatgcacaacctatccaattgccaattggtgctgaagataactttgaaggtatcatcgaccttgtgaagatgaaagctgaattttataaagatgatttagggactactttcgaagaaactgaaatcccagatgaatataaagaaacagctcaagaatggcataataatttggtagaatctgtagctgattttgatgaagatatcatgatgaaatacttggaaggtgaagaaattacacctgaagagttacaagcaggtattcgtaaagcaacattatctgttgaattttacccagtattatgtggttctgcatttaaaaacaaaggtgttcaaatgatgttggatgcagtaattgattacttgccttctccaaccgacgttcccccaattaaagggatcgatccgaaaacagatgaagaaactgaacatcctgctgatgatagtgagcctttttcatcacttgcttttaaagttatgtcagacccttatgttggccgcttaactttcttccgtgtttattcaggtgtgttggatacaggttcttatgtattgaatgctactaagggttcacgtgaacgaattggtcgtattttgcaaatgcatgccaattctcgttctgagatcgataaggtttattcaggtgacattgcagctgctgtaggcttgaagaacactacaacaggggataccctttgtgatgagaaaaatccagttattttggaaactatcaacttccctgaaccagtaattcaagttgctgttgaacctaagtcaaaagctgaccaagataaaatgagcgtagcactacaaaaacttgcagaagaagacccatcttttaaagtggaaaccaacgctgaaactggcgaaactgtaattgctggtatgggtgaacttcaattagacgttcttattgaccgtatgaagactgaatttaaagtggatgccaatattggtgcaccacaagtttcttatcgtgaaactttccgttcatcaactaaagctgaagggaaatttatccgccaatctggtggtagaggtcaatacggtcacgtatgggttgaatttactccaaacgaagaaggagcaggattcgaatttaaaaactccattgttggtggggttgtccctcgtgactatatacctgcagtacaaaaaggactggaagacgccatggaaaatggtgtgttagctggttatccattagttgacgtaaaggcagaactgtttgatggttcttaccatgacgtcgactctaatgaaacagccttccgtattgcggcttcaatgtctctacgtgaagctgcgaaaaaggcagatccagttattcttgaaccgatgatgaaagtaacaattagtatccctgaagaatatctaggtgatattatgggacatgttacagctcgtcgtggtcgtgttgaaggaatggatgctcacggtaatgcacaaactgtaaatgcgt

SEQ ID NO: 2231 - DNA, 1652 bp, Veillonella parvula ATCC 10790
aagtagaacgttctctacgtgtacttgacggttctgttgcggtgttcagtgctaaaggtggcgttgaacctcaatccgaaacagtatggcgtcaggcttctaactacggcgtacctcgtatcgcttatgtaaataagatggatactgtaggtgctgacttcttcaacgtagttgacatgatgaaagctcgtttgggtgcaaattccgtagctatccaagtaccaatcggtgctgaagatactttcgaaggcatcattgacttgatgactatgaaagcggaaatttataaatccgatgacggtaaagaatatgaaatcactgatatccctgctgaatatcaagaagtagcagaagctcgtcgcgaaatgatgatcgatgctatcgctgaaacagatgatgatatcatgatgaaatatttggaaggcgaagaaatttctgtggaagaattgaaagcggcattgcgtaaagctgttattgctaaccaattattcccagttctttgtggttcttcctataaaaataaaggtgttcaaatgttattggatgctgttatcgattacatgccagctccaatcgacatcccacctattaaaggtgttgttcctggtactgaagaagaaacaactcgtccttcttccgatgaagagccattctctgcattggcattcaaaatcatggctgacccttatgttggtaaattagcgttcttccgtgtgtactccggtacattggaatctggctcctacgttttcaactccactaaaggtaaaaaagaacgtatcggtcgtattcttcaaatgcacgctaactcccgtaaagaaatcgaacgcgtatattctggtgacatcgctgcggcggttggcttaaaggatactactacaggcgacacattgtgtgatgaaaaatctcctgtaatccttgagtccatggaattccctgaaccagttatctccgttgctgttgaacctaaaacaaaagctgaccaagaaaaaatgggtacagctcttgctcgtttggcagaagaagatcctactttcaaagttcgtactgatgaagaaacaggtcaaactattatctctggtatgggcgaacttcacttggatatcatcgttgaccgtatgaaccgtgaattcaaagtagattgtaacgtaggtaaacctcaagtagcataccgcgaaactatccgtaaagctgttaaggctgaaggtaaattcgtacgtcaatctggtggtcgtggtcaatatggtcactgctggttggaattgattcctcaagaaccaggtgctggcttcgagtttgaaaacaaggttgtaggtggtgcgattcctcgtgaatacatcggacctgttgaaagcggtgttaaagaagctatggaatccggtgttatcgctgggtaccctatggttgatgttaaagttatcgtatttgatggttcttaccatgacgttgactccaacgaaatggccttcaaaattgctggttctatgggcttcaaagaaggtgctcgcaaagcagaccctgcattgcttgaaccatatatggctgtagaagtagacgttcctgaagaatacatgggcgacgttatcggtgacttgaactctcgtcgtggtcgcatggacggcatggaagctcgtaatggttcccaacatatc

SEQ ID NO: 2232 - DNA, 1624 bp, Yersinia pseudotuberculosis ATCC 29833
agtagagcgttccatgcgtgttcttgacggcgcggtaatggtttactgtgcagttggtggtgttcagccacagtctgaaaccgtatggcgtcaggctaataaatataaagttccacgtattgcgttcgttaacaaaatggaccgtatgggtgcgaacttcctgcgcgtagttggtcaactgaaatctcgccttggtgcgaacccagttccactgcagttggcaattggcgcagaagaaaaattcaccggtattatcgatctggtgaaaatgaaagcgatcaactggaacgaagctgatcagggcgtgaccttcgaatatgaagaaatccctgctgatatggctgaactggctgctgaatggcaccagaatctggttgaatctgcggcagaagcgtctgacgagctgatggacaaatacttgggtggcgaagagctgaccgaagaagaaatcaagaaagctttacgtcaacgtgttctgaaaagcgaaattattcttgttacctgtggttctgcgtttaaaaacaaaggcgtacaggcaatgctggatgcggttattgagtacctgcctgcaccaactgacgttgaatcaatcaacggcatcttggatgatggcaaagatactccggctgttcgtcattctgacgacaaagagccgttctctgctctggcgttcaaaatcgctaccgacccattcgtgggtaacctgacgttcttccgcgtgtactctggtattgttaattccggtgataccgttctgaactcagtgaaatcgcaacgtgaacgcttaggtcgtatcgtacagatgcacgctaacaagcgtgaagagatcaaagaagttcacgccggtgatatcgcagccgctatcggtctgaaagatgtgactacgggtgacactttgtgtgacccgaataatccgatcatcttggaacgtatggagttcccagagccggtaatctctgttgctgttgaaccaaaaaccaaagctgaccaagaaaaaatgggtatggctctggggcgtttggcgaaagaagatccatcattccgcgtttggactgacgaagaatctggtcagactatcatcgctggtatgggtgagttgcatttggatatcctggttgaccgtatgcgccgcgaatttaacgtggaagcaaacgtcggtaaacctcaggttgcgtaccgtgaaactatccgcgaaaccgttaaggatgtggaaggtaagcacgctaagcagtcaggcggtcgtggtcagtatggtcatgttgttatcgacatgtctccattgccaccgggtggtgttgggtatgaattcgtcaacgaaatcgttggtggttctattcctaaagaattcattccggccgttgataaaggtattcaagaacagctgaaatctggccctctggcaggttacccagttgttgacgttaaagtgcgtctgcactacggttcttaccatgacgttgactcctcagaattggcatttaaattagctggttctatcgcctttaaagaaggtttcaaacgagctaaaccagttctgcttgagccaatcatgaaggttgaagtcgaaacccctgaagattacatgggtgacgtaatgggcgacctgaaccgtcgtcgcggtatc

SEQ ID NO: 2233 - DNA, 1636 bp, Zoogloae ramigera ATCC 25935
gaacgctcgatgcgcgtgcttgacggtgcttgcatggtttactgcgcagtgggcggtgttcagccacagtcggaaaccgtgtggcgtcaggctaacaagtacaaagtgccacgtctggccttcgtcaacaagatggaccgtaccggcgccaacttcttcaaggtgtacgagcagatgcgtgctcgcctgaaggccaacccggtcctgatccagatccctatcggcgctgaagacaacttcaaaggcgtgatcgatctggtcaagatgaaggctatcctgtgggacgaagcgtcgcaaggcatgaaattcgactacgtcgatattcctgcagagctggctgattcggccgccgagtggcgcgaaaagatggttgaagctgctgctgaagccaccgaagagctgatgaacaagtacctggaagaaggcgacctgaccgaagccgagatcaagcaggcgctgcgtacccgtaccatcgcttcggaaatcgttccgatgatgtgcggtaccgccttcaagaacaagggcgtacaggccatgctggacgcggtcatcgaatacctgccatcgccactggacatcgacgatgtcggcggtacggacgaagacgaccagccaaccacccgtcgcgcagctgacgacgagaaattctcggcgctggccttcaagatcatgaccgacccgttcgtcggtcaattggccttcttccgcgtgtactcgggcgccgtcaattcgggcgacaccgtgtacaactcggtcaaaggtcgtaaagagcgtctgggccgtattctgcagatgcacgcgaatcagcgcgaagagatcaaagaagtgcgcgccggcgacatcgccgctgcggttggcctgaaagacgtgaccacgggcgaaaccctgtgcgatccgaccgccatcatcacgctggaaaaaatgatcttccctgagcctgtgattcaacaggcagtcgagccaaaaaccaaggccgaccaggaaaaaatgggcctggcactgaaccgcctggcacaggaagatccttcgttccgcgtgaagaccgatgaagaatcgggccagaccatcatcggtggwatgggcgagctgcacctggaaattatcgttgaccgcatgaagcgcgaattcggcgtggaagcaaccgtcggcaagccacaagtggcttaccgcgaaacgatccgtaaaacctgcgaagaatcggaaggcaagttcgtcaagcaatccggtggtcgtggtcaatacggtcacgttgtgctgaagatcgagccgcaagaaccaggcaagggcttcgagttcgttgacgccatcaagggcggtaccgttcctcgcgagtacatccctgcggtggaaaaaggcgtgcgcggcaccctgaacaccggcgtgctggctggttacccggtcgtggacgtcaaggtcacgctgttcttcggttcgtaccacgatgtggactcgaacgaaaacgcgttccagatggccgcttcgatggcattcaaagaaggctgccgcaaagcatcgccagtcattctggagccaatgatggctgtggaagtggaaacgccggaagactacgccggtaccgtgatgggcgacctgtcgtcccgccgcggtatggtgcagggcatggacgaaatcccag

SEQ ID NO: 2234 - DNA, 1656 bp, Aeromonas hydrophila ATCC 7966
ggcacgaacgatcttgccggacgggccatcttccataccttcgatcaggccacgacgacggttcaggtcaccgatcacgtcgcccatatagtcttccggagtctcgacttctactttcatgatcggttcgagcagaaccgggttggccttcatgaagccagccttaaaggccatggaagcagcgatcttgaacgccagttcggaagagtcgacatcgtggtaggaaccgaagtgcagacgcacgcccagatccataaccggataacctgccagcgggccggacttcagttgctcgcggatacccttgtcaacacccgggatgaactcaccaggaatgacgccgcccttgatgtcgttgacgaattcgtaggctttgccttcttccagcgggtacatgtcgatcacaacgtgaccgtactgaccacgaccaccggactgcttggcgtgcttaccttcgatatccttgacggtgttacgaatggtttcacggtaggcaacctgcggcttacctacgttcgcttctaccttgaactcgcgacgcatacggtcaacgatgatgtccaggtgcagctcacccataccggcgatgatggtttggccagactcttcgtcagtccatacgcggaaggacgggtcttcctgagccagacggcccagagccaggcccatcttctcttggtcagccttggttttcggctcaactgcgatggagattaccggttccgggaattccatacgctcgaggatgatcggcgctttttcgtcacacagggtgtcaccggtggtcacgtctttcagaccaatggcggcagcgatgtcgcctgcgcgaacttctttgatctcttcacgcttgttggcgtgcatctgaacgatacggccaaaacgctcgcgcttctctttaacggagttcagcacggagtcaccggagttaaccacaccggagtaaacgcggaagaaggtcaggttgcctacgaacgggtcggtagcaatcttgaatgccagagcagcaaacggctcgtcatcagaagcatgacgctcgtctttggtctcgccatccagcttcagaccgtcgatggctgctacgtcggtcggcgccggcagatagtcaaccacggcatccagcatggcctgtacgcccttgttcttgaacgcggagccacaggtaaccaggatgatttcgttgttcagaacacgctgacgaagagctttcttgatctcttcctcggtcagttcttcaccacccaggtatttttccatcaggtcttcagacgcttcagcagcggcttcaaccagggtcatgcgcatttcttgcgctttttccagcagctcagccgggacgtcttcgtaatcgaaggatacgccctggtcagcttcgctccagttgatggctttcatcttgaccaggtcgataacgcccttgaagttctcttctgaaccgatgttcagttgcagcggaaccgggttacctttcagacgggtcttgatgtgctcaacgcagcgcaggaagttggcaccggtacggtccatcttgttgacgaacgcgatacggggaaccttgtacttgttagcctgacgccatacggtttcagactgtggctgtacgccachtacggcacagtacaccatcacggcgccgtccagaacacgcatggaacg

SEQ ID NO: 2235 - DNA, 155 bp, Abiotrophia adiacens ATCC 49175
tctcctccccatttgataactaccaaatgaacgctatcgactggttatgtcagtcataaccagttgatttttaagagagttctttggtataattacaatcggtagatactgttatagaatctaacaaaactcaattaataggaggaatcatttaa

SEQ ID NO: 2236 - DNA, 94 bp, Acinetobacter baumannii ATCC 19606
tctttcgattactataagccctaactaattcttagttaaaaaccaagtgctcatggagcgaccctccatgagtagttaataaaggaagatcatc

SEQ ID NO: 2237 - DNA, 150 bp, Actinomyces meyeri ATCC 35568
gtcccaccgggggtgagtgggggccgggcaatcggcccctgcgagccgcctcacacaccagtaatcccagtaggtctcatgccccatgggtgttaaagtgacacctagccgtaggctgagaatttctacccgagtccaggaggacgaaaa

SEQ ID NO: 2238 - DNA, 30 bp, Clostridium difficile ATCC 9689
ttcagtcctttaggcaaggagttaattgtc

SEQ ID NO: 2239 - DNA, 317 bp, Corynebacterium diphtheriae ATCC 27010
caactagcctctcgcttatctccctatgcaaaatttctagtcagttacagggcatagggggagcgtaggcgggggtagcggcttgctgagcacttcctctacatcaaagggaatgttgagccggccgttaccctgtacgatcccatctggtttcttcggtggtttgataaataccccgttgtgaccctaggatcatgtaactggcacaatgtaaatagctgtactgccaggctgccgaattagcagtcagaaatgtacagcactgtcaactcgtggctgcgaaatcgtagccaccacgaagtccaggaggacacaca

SEQ ID NO: 2240 - DNA, 69 bp, Enterobacter cloacae ATCC 13047
tccacaggattaaaacctaagtcccgtgctctctcctgaggggagagcactatagtaaggaatatagcc

SEQ ID NO: 2241 - DNA, 69 bp, Klebsiella pneumoniae subsp. pneumoniae ATCC 13883
tccacaggattaaaacctaagtcccgtgctctctccgaaggggagagcactatagtaaggaatatagcc

SEQ ID NO: 2242 - DNA, 126 bp, Listeria monocytogenes ATCC 15313
aacaacaaagaagattaattgatttttttcgcaacatcaagtataactttagttagaagtattacttagtttaaatttaagctaagtaaaaaataattatcgaattatcgaggaggatattttaaa

SEQ ID NO: 2243 - DNA, 170 bp, Mycobacterium avium ATCC 25291
gtgtcaactcactggctcggagccgagcaatcggctcagcgaaggcgacgggtcagtagctactggcagcggagtaatcttgccgggtcattggaatgccttgggcgcggcacaactgaaaacaccaacactgctttaacaagcaccaactagtccaggaggacacagaa

SEQ ID NO: 2244 - DNA, 103 bp, Mycobacterium gordonae strain M-Gor-1
ggccggcaagcctgcgagtaagctgacgcggttagcaccgcggcaaaaccaagaaaaatcaacactgcttttttaagcaccaacagtccaggaggacaacaaa

SEQ ID NO: 2245 - DNA, 101 bp, Mycobacterium kansasii strain Mkan-1
gccgagcgttgcgcgtaagctagctcggttaccacggcggcaaaactagaaaaacatcaacactgcttttataagcaccaacagtccaggaggacacagaa

SEQ ID NO: 2246 - DNA, 91 bp, Mycobacterium terrae strain Mter-1
ccagcttcccgcccgtgccgctacggtggcacaaacccaaaaagatcaatcctgctgtaacccagcaccaacaagtccaggaggacaagaa

SEQ ID NO: 2247 - DNA, 87 bp, Neisseria polysaccharea ATCC 43768
tcaggcaaataggccgtctgaaaggctgaaatgatttttcagacggcattgttctttaatcgatctttaatgtaaaggaattagctc

SEQ ID NO: 2248 - DNA, 218 bp, Staphylococcus epidermidis ATCC 14990
tataacttgttaagactagctatgctaggttaaaatacaggttgagcttatttataagctgacatttttatgatttgatttttaggggtaaatgcattataaaagaattataaattcttttatgctacactcaatcaattttcttctcatgatggtgagaaactatcatgagagataaatttgaaataacttttattaagaataggagagatttaata

SEQ ID NO: 2249 - DNA, 204 bp, Staphylococcus haemolyticus ATCC 29970
ttaaacttgttttagctagaatttctaggtaaaatacagcgtaagcttattaattaagctaacatctttatgaattgattttttactgaaaatgcattataaatgaattatgaattctaacaatcattatgtctcatgatggtgagaaactatcatgagagataatattgaaataacttttactagaataggagagatttaata

SEQ ID NO: 2250 - DNA, 38 bp, Artificial Sequence
  Synthetic DNA Sequence
ccgtcggatggtgtcgtataccgcggagtcgccgacgg

SEQ ID NO: 2251 - DNA, 38 bp, Artificial Sequence
  Synthetic DNA Sequence
cggagccgttctcgctgcgttacatgctggtggctccg

SEQ ID NO: 2252 - DNA, 18 bp, Artificial Sequence
  Synthetic DNA Sequence
ccacatacagtgtctctc

SEQ ID NO: 2253 - DNA, 19 bp, Artificial Sequence
  Synthetic DNA Sequence
cattacccaaccgaaagta

SEQ ID NO: 2254 - DNA, 19 bp, Artificial Sequence
  Synthetic DNA Sequence
acctgaacagagagaaatg

SEQ ID NO: 2255 - DNA, 273 bp, Abiotrophia adiacens ATCC 49175
atggcaaaagaaaaatttgaccgttcaaaaccacacgttaacattggtacaatcggccacgttgaccacggtaaaacaacattaactgctgctatcacaactgttttagctaagaaaggtttcgcgcaagctcaagattacggttcaatcgataaagctccagaagaacgcgaacgtggtatcacaatcaacacttctcacgttgagtacgaaacagacactcgtcactatgctcacgttgactgcccaggacacgcggactacgttaaaaac

SEQ ID NO: 2256 - DNA, 273 bp, Acinetobacter baumannii ATCC 19606
atggctaaagccaagtttgaacgtaataaaccacacgtaaacgtgggtacaatcggtcacgttgaccatggtaaaacaactttaactgctgcgattgcaacaatttgtgcaaaaacttacggcggtgaagcgaaagattactcacaaatcgactcagcacctgaagaaaaagcacgtggtattacaattaatacatcacacgtagaatacgattctccaactcgtcactacgcacacgttgactgcccaggccacgccgactacgttaaaaac

SEQ ID NO: 2257 - DNA, 279 bp, Actinomyces meyeri ATCC 35568
gtggcgaaggccaagtttgagcgcaccaagccgcacgtcaacatcggcacgattggtcacgttgaccacggcaagacgacgctgacggcagctatcaccaaggtgctgcatgacaagtaccccgaactgaacgagttcacccccttcgatcaggtcgacaacgctcccgaggagcgcgatcgtggcatcacgatcaacgtctctcacgttgagtaccagaccgaggcgcgtcactacgcgcacgttgacgctcccggccacgccgactacgtcaagaac

SEQ ID NO: 2258 - DNA, 273 bp, Clostridium difficile ATCC 9689
gtggctaaagaaaaatttgatcgttccctaccgcacgtcaacgttggcactatcggtcacgttgaccatggtaaaaccactctgactgctgctctgactcgcgtttgctccgaagtattcggttccgcaatcgttgatttcgataaaatcgacagcgcaccagaagaaaaagctcgtggtatcaccatcaacaccgcgcacgttgaatacaactcgctgatccgtcactacgctcacgttgactgcccaggtcacgctgactatgtgaagaac

SEQ ID NO: 2259 - DNA, 279 bp, Corynebacterium diphtheriae ATCC 27010
gtggcaaaggctaagttcgagcgtaccaagccgcacgtcaacatcggcaccatcggtcacgttgaccacggtaagaccaccaccaccgctgctatcaccaaggttttggcagacgcttacccagagctgaacgaagctttcgctttcgatgccatcgataaggcaccggaagagaaagagcgtggtattaccatcaacatctcccacgtggagtaccagaccgagaagcgccactacgcacacgttgacgctccaggtcacgctgactacatcaagaac

SEQ ID NO: 2260 - DNA, 273 bp, Enterobacter cloacae ATCC 13047
gtgtctaaagaaaaatttgaacgtacaaaaccgcacgtcaacgttggtactatcggccacgttgaccatggtaaaactaccctgactgctgcaatcactaccgttctggctaaaacctacggtggttctgctcgtgcattcgaccagatcgataacgcaccagaagaaaaagctcgtggtatcaccatcaacacctctcacgttgaatatgacaccccgactcgccactacgcacacgtagactgcccaggtcacgccgactatgttaaaaac

SEQ ID NO: 2261 - DNA, 273 bp, Klebsiella pneumoniae subsp. pneumoniae ATCC 13883
gtgtctaaagaaaaatttgaacgtacaaaaccgcacgtcaacgttggtactatcggccacgttgaccatggtaaaactaccctgactgctgccatcactaccgttctggctaaaacctacggtggttccgctcgcgcattcgaccagatcgataacgcgccggaagaaaaagctcgtggtatcaccatcaacacctctcacgttgaatatgacaccccgactcgccactacgcgcacgtagactgcccgggccacgccgactatgttaaaaac

SEQ ID NO: 2262 - DNA, 273 bp, Listeria monocytogenes ATCC 15313
atggcaaaagaaaaatttgaccgctctaaaccccatgttaacattggtactattggacacgttgaccatggtaaaacaactttaactgctgcaattacaactgtacttgctaaaaaaggctatgctgatgcacaagcttatgaccaaattgatggtgctccagaagaaagagaacgtggaatcacaatctctactgctcacgttgagtaccaaactgacagccgtcactatgcacacgttgactgcccaggacatgccgattacgttaaaaac

SEQ ID NO: 2263 - DNA, 279 bp, Mycobacterium avium ATCC 25291
gtggcgaaggcgaagttcgagcggacgaagccgcacgtcaacatcgggaccatcggtcacgttgaccacggcaagaccacgctgaccgcggctatcaccaaggttctgcacgacaagtacccggacctgaacgagtcccgcgcgttcgaccagatcgacaacgcgcccgaggagcgtcagcgcggtatcaccatcaacatctcccacgtggagtaccagaccgacaagcggcactacgctcacgtcgacgccccgggtcacgccgactacatcaagaac

SEQ ID NO: 2264 - DNA, 279 bp, Mycobacterium gordonae strain M-Gor-1
gtggcgaaggcgaagttccagcggaccaagccgcacgtcaacatcgggaccatcggtcacgttgaccacggcaagaccactctgaccgcggctatcaccaaggtcctgcacgacaagtacccggacctgaacgagtccaaggcgttcgaccagatcgacaacgcgcctgaggagcgtcagcgcggtatcacgatcaacatcgcgcacgtggaataccagaccgagaagcgtcactacgcgcacgtcgacgcccccggccacgccgactacatcaagaac

SEQ ID NO: 2265 - DNA, 279 bp, Mycobacterium kansasii strain Mkan-1
gtggcgaaggcgaagttccagcggaccaagccccacgtcaacatcgggaccatcggtcacgttgaccacggcaagaccaccctgaccgcggctatcaccaaggtcctgcatgacaagttcccggacctgaacgagtcgaaggcgttcgaccagatcgacaacgctcctgaggagcgccagcgcggtatcacgatcaacatcgcgcacgtggagtaccagaccgagaagcggcactatgcacacgtcgacgcgccgggccacgccgactacatcaagaac

SEQ ID NO: 2266 - DNA, 279 bp, Mycobacterium terrae strain Mter-1
gtggcgaaggcgaagttcgagcggacgaagccgcacgtcaacatcgggaccatcggtcacgttgaccacggcaagaccacgctgaccgcggctatcaccaaggttctgcacgacaagtacccggacctcaacgagtcgcgtgcgttcgaccagatcgacaacgctcccgaagagcgtcagcgcggtatcaccatcaacatctcccacgtggagtaccagaccgagaagcggcactacgcccacgtcgacgctcctggtcacgctgactacatcaagaac

SEQ ID NO: 2267 - DNA, 273 bp, Neisseria polysaccharea ATCC 43768
atggctaaggaaaaattcgaacgtagcaaaccgcacgtaaacgttggcaccatcggtcacgttgaccatggtaaaaccactctgactgctgctttgactactattttggctaaaaaattcggcggtgctgcaaaagcttacgaccaaatcgacaacgcacccgaagaaaaagcacgcggtattaccattaacacctcgcacgtagaatacgaaaccgaaacccgccactacgcacacgtagactgcccgggtcacgccgactacgttaaaaac

SEQ ID NO: 2268 - DNA, 273 bp, Staphylococcus epidermidis ATCC 14990
atggcaaaagaaaaatttgatcgctcaaaagaacatgccaatattggtactatcggtcacgttgaccatggtaaaacaactttaacagctgctatcgcaactgtattagctaaaaatggtgacactgttgcacaatcatacgatatgattgacaacgctccagaagaaaaagaacgtggtattacaatcaatactgcacatatcgaataccaaactgacaaacgtcactatgctcacgttgactgcccaggacacgctgactatgttaaaaac

SEQ ID NO: 2269 - DNA, 273 bp, Staphylococcus haemolyticus ATCC 29970
atggcaaaagaaaaatttgatcgctcaaaagaacatgccaatattggtactatcggtcacgttgaccatggtaaaactactttaacagctgctatcgcaactgtattagctaaaaatggtgacactgtagcacaatcatatgacatgattgacaacgctccagaagaaaaagaacgtggtatcacaatcaatactgcacacatcgagtatcaaactgacaaacgtcactatgctcacgttgactgcccaggacacgctgactatgttaaaaac

SEQ ID NO: 2270 - DNA, 812 bp, Aeromonas hydrophila ATCC 7966
cgatcctggtagtagcagcgactgacggcccgatgccgcagactcgtgagcacatcctgctgggtcgtcaggtaggcgttccgtacatcatcgtgttcatgaacaagtgtgacatggtagatgacgaagagctgctggaactggtcgagatggaagttcgcgaactgctgtccgagtacgacttcccgggtgatgacctgccggtagtccgtggttcygcactgaaagcgctggaaggcgaagctcagtgggaagagaagatcctggaactggctggccacctggacacctacattccggagccggagcgtgccatcgacctgccgttcctgatgcctatcgaagacgtattctccatcgctggccgyggtaccgtagtgaccggtcgtgtagagcgcggtatcgtcaaagttggtgaagaagtggaaatcgtkggtatcaaagataccaccaagaccacctgtaccggcgttgaaatgttccgcaaactgctggacgaaggtcgtgcaggcgagaacatcggtgcactgctgcgtggcgtgaagcgtgaagacgtagagcgtggtcaggtactggccaagccgggcaccatcaagccgcacaccaagttygaatctgaagtgtacgtgctgtccaaagaagaaggtggtcgtcataccccgttcttcaaaggctaccgtccgcagttctacttccgtactaccgacgtgaccggtaccatcgaactgccggaaggcgtagagatggtaatgccgggcgacaacatcaagatggttgttaccctgattgcgccgatcgcgatggacgacggc

SEQ ID NO: 2271 - DNA, 799 bp, Bilophila wadsworthia ATCC 49260
cgacggtcccatgccccagacccgtgagcacatcctgctcgcccgtcaggtcggcgtgcctcacctcgtcgtgttcatgaacaagtgtgacctcgtcgacgaccccgaactgctcgaactcgtcgaaatggaagtccgcgaactgctgagctcctacggctaccccggcgatgaaatcccggttgtccgcggttccgctctgaaggctctggaatccgatagcgctgattcccctgacgcccagtgcgtgctcgaactgctcgccgcttgcgacagctacttcccggatccggtccgcgaaaccgacaagcccttcctgatgcccatcgaagacgtgttctccatctccggccgcggtaccgtggtcaccggtcgtgtggaacgtggcatcatcaaggtcggcgaagaagtcgaaatcgtgggtatccgtcccaccgtgaagacgacctgcaccggcgtcgaaatgttccgcaagctgctcgatcagggccaggccggcgacaacatcggcgctctgctccgcggcacgaagcgtgacgaagtggaacgcggccaggttctcgccgctcccaagagcatcacgccccacaagaagttcaaggctgaagtgtacgttctgtccaaggaagaaggcggccgccataccccgttcttcaccggctatcgtcctcagttctacttccgtaccaccgacatcaccggtatcatcgctcttgaagaaggcgttgaaatggttatgcccggcgataacgctacctttaatgtcgagctcattcaccccatcgccatggaaaagggc

SEQ ID NO: 2272 - DNA, 786 bp, Brevundimonas diminuta ATCC 11568
gatcctggtgtgctcggccgctgacggcccgatgccgcagacccgcgagcacatcctgctgtcgcgtcaggtcggcgttccggcgctggtggtgttcctgaacaaggtcgacatggtcgacgacgaggarctgctggagctggtcgagatggaagtgcgcgagctgctgagctcgtaccagttcccgggcgacgacatcccggtggtcaagggctcggccctggccgcggtggaggatcgcgacccgcacatcggcgccgagcgcgttctggagctgatggcggcggtcgacagctacatcccgcagccggaacgtccgatcgacatgccgttcctgatgccggtggaagacgtgttctcgatctcgggccgcggcaccgtggtgacgggtcgcgtcgagcgcggcgtcgtcaaggtcggtgaagaagtcgaaatcgtcggcatccgtccggttcagaagacgacctgcacgggcgtcgaaatgttccgcaagctgctggaycagggtcargccggcgacaacgtgggcgtgctgctgcgcggcaccaagcgtgaagacgtcgagcgcggccaggtgctgtgcaagccgggttcgatcaccccgcacaccaagttcgtggctgaagcctacatcctgaacaaggaagaaggcggccgtcacacgccgttcttcacgaactaccgtccgcagttctacttccgcacgacggacgtgaccggcatcgtgcgcctgaaggaaggcgtcgagatgatcatgccgggcgacaacgccgagctggacgtcga

SEQ ID NO: 2273 - DNA, 560 bp, Streptococcus mitis strain LSPQ 2583
gctattatggctggattactatccaatacgctatccaagaatcccgtaacgtacctgccgtcaaatcgctggaagcagtcggattagataattcattgaaattcctcaatggccttggtatcaattatcctgagatgcattattctaatgcgatttcaagtaatacaagcgaatctggtaaccaatacggagcaagtagcgaaaaaatggctgccgcttacgctgcctttgctaatggcggtacatattacaaaccgcaatacgtcaaccgagttgtctttagcgacggtacagaaaaagtcttttcaaatggcggatcaaaagccatgaaagagacgacagcctacatgatgacagacatgatgaagaccgttcttcagtctggaactggtaccaatgctgcaatcccaggagtttatcaagcaggtaaaactggtacttccaactatgcagatgatgagctagagaagttgacaaaaccttattacagttctagcattgtcacaccagacgaactatttgttggctatactccacaatactctatggctgtttggaca

SEQ ID NO: 2274 - DNA, 551 bp, Streptococcus mitis ATCC 49456
gctactttggaaacattactgtccaatatgctcttcaacaatcacgtaatgtcacagccgttgaaactttgaataaggtcggtctagataaggctaaagccttccttaatgggcttggtattgattatccaagcatgcattatgcaaacgccatttcaagtaatacaactgaatccaacaaaaaatacggtgcaagtagtgaaaaaatggctgctgcctacgctgcttttgctaatggtggtatttaccacaagccaatgtacatcaataaaatcgtctttagcgacggtagtgagaaagaattttctgatgccggcacacgagctatgaaagaaactactgcctatatgatgactgaaatgatgaaaacagtcctagtatacggtaccggacgtggagcctacctaccatggcttccacaagcaggtaagacaggtacttctaactatactgacgacgaaattgaaaagtatatcaagaacactggctacgtagccccagatgaaatgtttgtagggtatactcgtaaatatgcaatggctgtttggaca

SEQ ID NO: 2275 - DNA, 560 bp, Streptococcus mitis ATCC 903
gctattatggctggattactatccaatacgctatccaagaatcccgtaacgtaccagccgtcaaatcgctggaagcagtcggattagataattcattgaagttcctcaatggccttggtattaattaccctgaaatgcattattctaatgcgatttcaagtaatacaagcgaatctggtaaccaatacggagcaagtagcgaaaaaatggctgccgcttacgctgcctttgctaatggcggtacatattacaaaccgcaatacgtcaaccgagttgtctttagcgacggtacagaaaaagtcttttcaaatggcggatcaaaagccatgaaagaaacgacagcctacatgatgacagacatgatgaagaccgttcttcaatctggaactggtaccaatgctgcaattccaggagtctatcaagcaggtaaaaccggcacttccaactatgcagatgatgaactagagaagttgacaaaaccttattacagttctagcattgtcacaccagacgagctgtttgttggctacactccacagtactctatggctgtttggaca

SEQ ID NO: 2276 - DNA, 550 bp, Streptococcus oralis ATCC 35037
ttattttggaaatatcaccatccaatatgcgctccaacaatcacggaacgttacagccgtagaaaccttgaacaaagtcggtttggatagagccaagaccttcctgaatggaatcggtattgactatccagatatgcactatgccaacgcgatttcaagtaatacgactgagtcaaacaaaaagtacggagcaagtagtgagaaaatggctgctgcttacgctgcttttgctaacggtggtatctaccataaaccaatgtatatcaacaaaatcgtctttagcgatggtagctcaaaagaatacgctgatcctggtactcgtgccatgaaagagacgaccgcctatatgatgacagaaatgatgaagactgtcttggcatacggaacgggtcgtggtgcttatctcccttggctacctcaagctggtaagactggtacatcaaactatacagatgatgaaattgaaaactacatcaaaaatactggttatgtagccccagacgaaatgtttgttggttatactcgcaaatattcaatggctgtwtggaca

SEQ ID NO: 2277 - DNA, 356 bp, Escherichia coli ATCC 35401
gctcctatctggattatgcgatgtcggtcattgttggccgtgcgctgccagatgtccgagatggcctgaagccggtacaccgtcgcgtactttacgccatgaacgtactaggcaatgactggaacaaagcctataaaaaatctgcccgtgtcgttggtgacgtaatcggtaaataccatccccatggtgactcggcggtctatgacacgatcgtccgcatggcgcagccattctcgctgcgttatatgctggtagacggtcagggtaacttcggttctatcgacggcgactctgcggcggcaatgcgttatacggaaatccgtctggcgaaaattgcccatgaactgatggccgat

SEQ ID NO: 2278 - DNA, 347 bp, Escherichia coli ATCC 23511
ctcttatctggattatgcgatgtcggtcattgttggccgcgcgctgccggatgtccgagatggcctgaagccggtacaccgtcgcgtactttacgccatgaacgtattgggcaatgactggaacaaagcctacaaaaaatcagcccgtgtcgttggtgacgtgatcggtaaataccacccgcacggcgactccgcggtatatgacaccatcgttcgtatggcccagccgttctcgctgcgctacatgctggtggatggccaggggaacttcggttcaatcgacggcgactccgccgcggcaatgcgttatacggaaatccgtctggcgaaaattgctcacgaactga

SEQ ID NO: 2279 - DNA, 362 bp, Escherichia coli ATCC 43886
agagctcctatctggattatgcgatgtcggtcattgttggccgtgcgctgccagatgtccgagatggcctgaagccggtacaccgtcgcgtactttacgccatgaacgtactaggcaatgactggaacaaagcctataaaaaatctgcccgtgtcgttggtgacgtaatcggtaaataccatccccatggtgactcggcggtctatgacacgatcgtccgcatggcgcagccattctcgctgcgttatatgctggtagacggtcagggtaacttcggttctatcgacggcgactctgcggcggcaatgcgttatacggaaatccgtctggcgaaaattgcccatgaactgatggccgatctc

SEQ ID NO: 2280 - DNA, 358 bp, Escherichia coli ATCC 25922
ctcctatctggattatgcgatgtcggtcattgttggccgtgcgctgccagatgtccgagatggcctgaagccggtacaccgtcgcgtactttacgccatgaacgtactaggcaatgactggaacaaagcctataaaaaatctgcccgtgtcgttggtgacgtaatcggtaaataccatccccatggtgactcggcggtttatgacacgatcgtccgtatggcgcagccattctcgctgcgttacatgctggtagacggtcagggtaacttcggttccatcgacggcgactctgcggcggcaatgcgttatacggaaatccgtctggcgaaaattgcccatgaactgatggccgatctc

SEQ ID NO: 2281 - DNA, 30 bp, Artificial Sequence
  Synthetic DNA Sequence
cccccagctgggcggcggtatcgatggggg

SEQ ID NO: 2282 - DNA, 18 bp, Artificial Sequence
  Synthetic DNA Sequence
  modified_base (7): i
agrrgcnmaratgtatga

SEQ ID NO: 2283 - DNA, 22 bp, Artificial Sequence
  Synthetic DNA Sequence
  modified_base (3): i
  modified_base (13): i
atntatgayggknttcagaggc

SEQ ID NO: 2284 - DNA, 21 bp, Artificial Sequence
  Synthetic DNA Sequence
  modified_base (11): i
tctgwgtracnggytckgaga

SEQ ID NO: 2285 - DNA, 19 bp, Artificial Sequence
  Synthetic DNA Sequence
  modified_base (5): i
cmccnccwggtggwgawac

SEQ ID NO: 2286 - DNA, 20 bp, Artificial Sequence
  Synthetic DNA Sequence
agttgctgtattaggaaatg

SEQ ID NO: 2287 - DNA, 20 bp, Artificial Sequence
  Synthetic DNA Sequence
tcgaagttgctgtattagga

SEQ ID NO: 2288 - DNA, 1240 bp, Enterococcus faecium strain BM4339
tagaagctggctcgtttttttataaataagttattcgtttatttttgttttgtgctaaaatatgagagtaaatcactgaacgatttagaatacaggaggacaatcttttgaagattactttactatatggcggacgcagcgcagagcagagcatgaagtgtccattctttccgcattttcagttttaaatgccatttattataattattaccaagttcaactcgtatttattacaaaagaaggacaatgggtcaaaggtccattactaacagaaaaacctgccagcaaagatgtcttgcatctttcatgggacccaagtggacagacagaggaaggctttacaggaaaagtgatcaatccgggcgaaatcaaagaagaaggagccatcgtttttccagttttacatgggccaaacggggaagatggaacgatccaaggcttcttagagacattgaatatgccttatgtcggcgcaggcgtattgaccagtgcatgtgccatggataaaatcatgaccaagtatattttacaagctgctggtgtgccgcaagttccttatgtaccagtacttaagaatcaatggaaagaaaatcctaaaaaagtatttgatcaatgtgaaggttctttgctttatccgatgtttgtcaaaccggcgaatatgggttctagtgtcggcattacaaaagcagaaaaccgagaagagctgcaaaatgctttagcaacagcctatcagtatgattctcgagcaatcgttgaacaaggaattgaagcgcgcgaaatcgaagttgctgtattaggaaatgaagacgttcggacgactttgcctggtgaagtcgtaaaagacgtagcattctatgattatgaagcaaaatatatcaataataaaatcgaaatgcagattccagccgaagtgccagaagaagtttatcaaaaagcgcaagagtacgcgaagttagcttacacgatgttaggtggaagcggattgagccggtgcgatttctttttgacaaataaaaatgaattattcctgaatgaattaaactctatgccaggatttacggagttcagtatgtacccactcttatgggaaaatatgggcttgaaatacggtgatttgattgaagaactgatccagttaggaatgaatcgataccatcagcgtcaatctttttttgaaaaaaatgaataaagagaaataaagaagaggctggagtgattgcgtaaccgcgttcattctagc

SEQ ID NO: 2289 - DNA, 20 bp, Artificial Sequence
  Synthetic DNA Sequence
caccgaagaagatgaaaaaa

SEQ ID NO: 2290 - DNA, 18 bp, Artificial Sequence
  Synthetic DNA Sequence
tggcaccgaagaagatga

SEQ ID NO: 2291 - DNA, 19 bp, Artificial Sequence
  Synthetic DNA Sequence
attttggcaccgaagaaga

SEQ ID NO: 2292 - DNA, 19 bp, Artificial Sequence
  Synthetic DNA Sequence
gaatcggcaagacaatatg

SEQ ID NO: 2293 - DNA, 1032 bp, Enterococcus faecium strain BM4147
atgaatagaataaaagttgcaatactgtttgggggttgctcagaggagcatgacgtatcggtaaaatctgcaatagagatagccgctaacattaataaagaaaaatacgagccgttatacattggaattacgaaatctggtgtatggaaaatgtgcgaaaaaccttgcgcggaatgggaaaacgacaattgctattcagctgtactctcgccggataaaaaaatgcacggattacttgttaaaaagaaccatgaatatgaaatcaaccatgttgatgtagcattttcagctttgcatggcaagtcaggtgaagatggatccatacaaggtctgtttgaattgtccggtatcccttttgtaggctgcgatattcaaagctcagcaatttgtatggacaaatcgttgacatacatcgttgcgaaaaatgctgggatagctactcccgccttttgggttattaataaagatgataggccggtggcagctacgtttacctatcctgtttttgttaagccggcgcgttcaggctcatccttcggtgtgaaaaaagtcaatagcgcggacgaattggactacgcaattgaatcggcaagacaatatgacagcaaaatcttaattgagcaggctgtttcgggctgtgaggtcggttgtgcggtattgggaaacagtgccgcgttagttgttggcgaggtggaccaaatcaggctgcagtacggaatctttcgtattcatcaggaagtcgagccggaaaaaggctctgaaaacgcagttataaccgttcccgcagacctttcagcagaggagcgaggacggatacaggaaacggcaaaaaaaatatataaagcgctcggctgtagaggtctagcccgtgtggatatgtttttacaagataacggccgcattgtactgaacgaagtcaatactctgcccggtttcacgtcatacagtcgttatccccgtatgatggccgctgcaggtattgcacttcccgaactgattgaccgcttgatcgtattagcgttaaaggggtga

SEQ ID NO: 2294 - DNA, 20 bp, Artificial Sequence
  Synthetic DNA Sequence
aaacgaggatgatttgattg

SEQ ID NO: 2295 - DNA, 18 bp, Artificial Sequence
  Synthetic DNA Sequence
ttgagcaagcgatttcgg

SEQ ID NO: 2296 - DNA, 1029 bp, Enterococcus faecalis strain V583; identical to SEQ ID NO: 1713

SEQ ID NO: 2297 - DNA, 17 bp, Artificial Sequence
  Synthetic DNA Sequence
ttcaggagggggatcgc

SEQ ID NO: 2298 - DNA, 20 bp, Artificial Sequence
  Synthetic DNA Sequence
cttaacgctgcgatagaagc

SEQ ID NO: 2299 - DNA, 45 bp, Artificial Sequence
  Synthetic DNA Sequence
cccagcgctgtcatattgtcttgccgattcaattgcgtcgctggg

SEQ ID NO: 2300 - DNA, 41 bp, Artificial Sequence
  Synthetic DNA Sequence
cacccgaggatgatttgattgtcggcgaagtggatcgggtg

SEQ ID NO: 2301 - DNA, 41 bp, Artificial Sequence
  Synthetic DNA Sequence
ccggcgatgcctcttcacattgctccacctttcctcgccgg

SEQ ID NO: 2302 - DNA, 294 bp, Artificial Sequence
  Synthetic DNA Sequence
aatagcgcggacgaattggacaagtacaagaaggttggttacaacccaaagacagctgtgcatgaattgcagaaaatttattgcagcttcgccacaggaaaggtggagcaatgtgaagaggcatcatgccatctgctgtaggctatcaaccaatggtaagactcttctggaagcaattgagctatggtcatgccaggtgacaacatatgatgagtcatgccatgcgtaaatcaaagataatgttcagggaacatccggtaaagttactggtaaggtatcttccgcatccatcag
